(19) United States
(12) Patent Application Publication
(10) Pub. No.: US 2023/0144436 A1
(43) Pub. Date: May 11, 2023

(54) MUSCLE TARGETING COMPLEXES AND USES THEREOF FOR TREATING MYOTONIC DYSTROPHY

(71) Applicant: Dyne Therapeutics, Inc., Waltham, MA (US)

(72) Inventors: Romesh R. Subramanian, Framingham, MA (US); Mohammed T. Qatanani, Waltham, MA (US); Timothy Weeden, Waltham, MA (US); Cody A. Desjardins, Waltham, MA (US); Brendan Quinn, Boston, MA (US)

(73) Assignee: Dyne Therapeutics, Inc., Waltham, MA (US)

(21) Appl. No.: 17/791,681

(22) PCT Filed: Jan. 8, 2021
(86) PCT No.: PCT/US2021/012667

§ 371 Date: Jul. 8, 2022

Related U.S. Application Data
(60) Provisional application No. 63/132,856, filed on Dec. 31, 2020.
(60) Provisional application No. 63/069,063, filed on Aug. 23, 2020.
(60) Provisional application No. 63/055,499, filed on Jul. 23, 2020.
(60) Provisional application No. 62/968,383, filed on Jan. 31, 2020.
(60) Provisional application No. 62/965,712, filed on Jan. 24, 2020.
(60) Provisional application No. 62/959,776, filed on Jan. 10, 2020.

(51) Int. Cl. A61K 47/68; A61P 21/00

(52) U.S. Cl. CPC A61K 47/6807; A61K 47/6849; A61P 21/00; A61K 2039/505

(57) ABSTRACT

Aspects of the disclosure relate to complexes comprising a muscle-targeting agent covalently linked to a molecular payload. In some embodiments, the muscle-targeting agent specifically binds to an internalizing cell surface receptor on muscle cells. In some embodiments, the molecular payload inhibits expression or activity of a DMPK allele comprising a disease-associated-repeat. In some embodiments, the molecular payload is an oligonucleotide, such as an antisense oligonucleotide or RNAi oligonucleotide.

### RELATED APPLICATIONS

[0001] This application claims the benefit under 35 U.S.C. § 119(e) of the filing date of U.S. Provisional Application No. 63/132,856, entitled “MUSCLE TARGETING COMPLEXES AND USES THEREOF”, filed Dec. 31, 2020; U.S. Provisional Application No. 63/069,063, entitled “MUSCLE TARGETING COMPLEXES AND USES THEREOF FOR TREATING MYOTONIC DYSTROPHY”, filed Aug. 23, 2020; U.S. Provisional Application No. 63/055,499, entitled “MUSCLE TARGETING COMPLEXES AND USES THEREOF FOR TREATING MYOTONIC DYSTROPHY”, filed Jul. 23, 2020; U.S. Provisional Application No. 62/968,383, entitled “MUSCLE TARGETING COMPLEXES AND USES THEREOF FOR TREATING MYOTONIC DYSTROPHY”, filed Jan. 31, 2020; U.S. Provisional Application No. 62/965,712, entitled “MUSCLE TARGETING COMPLEXES AND USES THEREOF FOR TREATING MYOTONIC DYSTROPHY”, filed Jan. 24, 2020; and U.S. Provisional Application No. 62/959,776, entitled “MUSCLE TARGETING COMPLEXES AND USES THEREOF FOR TREATING MYOTONIC DYSTROPHY”, filed Jan. 10, 2020; the contents of each of which are incorporated herein by reference in their entirety.

### FIELD OF THE INVENTION

[0002] The present application relates to targeting complexes for delivering molecular payloads (e.g., oligonucleotides) to cells and uses thereof, particularly uses relating to treatment of disease.

### REFERENCE TO SEQUENCE LISTING SUBMITTED AS A TEXT FILE VIA EFS-WEB

[0003] The instant application contains a sequence listing which has been submitted in ASCII format via EFS-Web and is hereby incorporated by reference in its entirety. Said ASCII copy, created on Jan. 8, 2021, is named D082470029W000-SEQ-ZJG and is 762 kilobytes in size.

### BACKGROUND

[0004] Myotonic dystrophy (DM) is a dominantly inherited genetic disease that is characterized by myotonia, muscle loss or degeneration, diminished muscle function, insulin resistance, cardiac arrhythmia, smooth muscle dysfunction, and neurological abnormalities. DM is the most common form of adult-onset muscular dystrophy, with a worldwide incidence of about 1 in 8000 people worldwide. Two types of the disease, myotonic dystrophy type 1 (DM1) and myotonic dystrophy type 2 (DM2), have been described. DM1, the more common form of the disease, results from a repeat expansion of a CTG trinucleotide repeat in the 3′ non-coding region of DMPK on chromosome 19; DM2 results from a repeat expansion of a CCTG tetranucleotide repeat in the first intron of ZNF9 on chromosome 3. In DM1 patients, the repeat expansion of a CTG trinucleotide repeat, which may comprise greater than ˜50 to ˜3,000+ total repeats, leads to generation of toxic RNA repeats capable of forming hairpin structures that bind essential intracellular proteins, e.g. muscleblind-like proteins, with high affinity resulting in protein sequestration and the loss-of-function phenotypes that are characteristic of the disease. Apart from supportive care and treatments to address the symptoms of the disease, no effective therapeutic for DM1 is currently available.

### SUMMARY

[0005] In some aspects, the disclosure provides complexes that target muscle cells for purposes of delivering molecular payloads to those cells. In some embodiments, complexes provided herein are particularly useful for delivering molecular payloads that inhibit the expression or activity of a DMPK allele comprising an expanded disease-associated-repeat, e.g., in a subject having or suspected of having myotonic dystrophy. Accordingly, in some embodiments, complexes provided herein comprise muscle-targeting agents (e.g., muscle targeting antibodies) that specifically bind to receptors on the surface of muscle cells for purposes of delivering molecular payloads to the muscle cells. In some embodiments, the complexes are taken up into the cells via a receptor mediated internalization, following which the molecular payload may be released to perform a function inside the cells. For example, complexes engineered to deliver oligonucleotides may release the oligonucleotides such that the oligonucleotides can inhibit mutant DMPK expression in the muscle cells. In some embodiments, the oligonucleotides are released by endosomal cleavage of covalent linkers connecting oligonucleotides and muscle-targeting agents of the complexes.

[0006] Some aspects of the present disclosure provide complexes comprising an anti-transferrin receptor antibody covalently linked to a molecular payload configured for inhibiting DMPK expression or activity. In some embodiments, the anti-TfR antibody comprises a heavy chain complementarity determining region 1 (CDR-H1), a heavy chain complementarity determining region 2 (CDR-H2), a heavy chain complementarity determining region 3 (CDR-H3), a light chain complementarity determining region 1 (CDR-L1), a light chain complementarity determining region 2 (CDR-L2), a light chain complementarity determining region 3 (CDR-L3) of any of the anti-TfR antibodies listed in Table 2, 4, and 7.

[0007] In some embodiments, the antibody comprises a CDR-H1, a CDR-H2, and a CDR-H3 of a heavy chain variable region (VH) comprising the amino acid sequence of SEQ ID NO: 15, and a CDR-L1, a CDR-L2, and a CDR-L3 of a light chain variable region (VL) comprising the amino acid sequence of SEQ ID NO: 16. In some embodiments, the antibody comprises a CDR-H1, a CDR-H2, and a CDR-H3 of a VH comprising the amino acid sequence of SEQ ID NO: 204, and a CDR-L1, a CDR-L2, and a CDR-L3 of a VL comprising the amino acid sequence of SEQ ID NO: 205. In some embodiments, the antibody comprises a CDR-H1, a CDR-H2, and a CDR-H3 of a VH comprising the amino acid sequence of SEQ ID NO: 7, and a CDR-L1, a CDR-L2, and a CDR-L3 of a VL comprising the amino acid sequence of SEQ ID NO: 8. In some embodiments, the antibody comprises a CDR-H1, a CDR-H2, and a CDR-H3 of a VH comprising the amino acid sequence of SEQ ID NO: 23, and a CDR-L1, a CDR-L2, and a CDR-L3 of a VL comprising the amino acid sequence of SEQ ID NO: 24.

[0008] In some embodiments, the antibody comprises a CDR-H1 of SEQ ID NO: 155, a CDR-H2 of SEQ ID NO: 156, a CDR-H3 of SEQ ID NO: 157, a CDR-L1 of SEQ ID NO: 158, a CDR-L2 of SEQ ID NO: 159, and a CDR-L3 of SEQ ID NO: 14. In some embodiments, the antibody comprises a CDR-H1 of SEQ ID NO: 194, a CDR-H2 of SEQ ID NO: 195, a CDR-H3 of SEQ ID NO: 196, a CDR-L1 of SEQ ID NO: 197, a CDR-L2 of SEQ ID NO: 198, and a CDR-L3 of SEQ ID NO: 193. In some embodiments, the antibody comprises a CDR-H1 of SEQ ID NO: 145, a CDR-H2 of SEQ ID NO: 146, SEQ ID NO: 732, or SEQ ID NO: 734, a CDR-H3 of SEQ ID NO: 147, a CDR-L1 of SEQ ID NO: 148, a CDR-L2 of SEQ ID NO: 149, and a CDR-L3 of SEQ ID NO: 6. In some embodiments, the antibody comprises: a CDR-H1 of SEQ ID NO: 165, SEQ ID NO: 736, or SEQ ID NO: 738, a CDR-H2 of SEQ ID NO: 166, a CDR-H3 of SEQ ID NO: 167, a CDR-L1 of SEQ ID NO: 168, a CDR-L2 of SEQ ID NO: 169, and a CDR-L3 of SEQ ID NO: 22.

[0009] In some embodiments, the antibody comprises human or humanized framework regions with the CDR-H1, the CDR-H2, the CDR-H3 of a VH as set forth in SEQ ID NO: 15, and the CDR-L1, the CDR-L2, the CDR-L3 of a VL as set forth in SEQ ID NO: 16. In some embodiments, the antibody comprises human or humanized framework regions with the CDR-H1, the CDR-H2, the CDR-H3 of a VH as set forth in SEQ ID NO: 204, and the CDR-L1, the CDR-L2, the CDR-L3 of a VL as set forth in SEQ ID NO: 205. In some embodiments, the antibody comprises human or humanized framework regions with the CDR-H1, the CDR-H2, the CDR-H3 of a VH as set forth in SEQ ID NO: 7, and the CDR-L1, the CDR-L2, the CDR-L3 of a VL as set forth in SEQ ID NO: 8. In some embodiments, the antibody comprises human or humanized framework regions with the CDR-H1, the CDR-H2, the CDR-H3 of a VH as set forth in SEQ ID NO: 23, and the CDR-L1, the CDR-L2, the CDR-L3 of a VL as set forth in SEQ ID NO: 24.

[0010] In some embodiments, the antibody comprises a VH comprising an amino acid sequence at least 80% identical to SEQ ID NO: 15, and a VL comprising an amino acid sequence at least 80% identical to SEQ ID NO: 16. In some embodiments, the antibody comprises a VH comprising an amino acid sequence at least 80% identical to SEQ ID NO: 204, and a VL comprising an amino acid sequence at least 80% identical to SEQ ID NO: 205, optionally wherein the antibody comprises a VH comprising the amino acid sequence of SEQ ID NO: 204 and a VL comprising the amino acid sequence of SEQ ID NO: 205. In some embodiments, the antibody comprises a VH comprising an amino acid sequence at least 80% identical to SEQ ID NO: 7, and a VL comprising an amino acid sequence at least 80% identical to SEQ ID NO: 8. In some embodiments, the antibody comprises a VH comprising an amino acid sequence at least 80% identical to SEQ ID NO: 23, and a VL comprising an amino acid sequence at least 80% identical to SEQ ID NO: 24.

[0011] In some embodiments, the equilibrium dissociation constant (K_{D}) of binding of the antibody to the transferrin receptor is in a range from 10⁻¹¹M to 10⁻⁶ M.

[0012] In some embodiments, the antibody is selected from the group consisting of a full-length IgG, a Fab fragment, a F(ab′) fragment, a F(ab′)2 fragment, a scFv, and a Fv, optionally wherein the antibody is a Fab′ fragment.

[0013] In some embodiments, the molecular payload is an oligonucleotide.

[0014] In some embodiments, the oligonucleotide comprises a region of complementarity to at least 15 consecutive nucleotides of SEQ ID NO: 727.

[0015] In some embodiments, the oligonucleotide comprises a region of complementarity to at least 15 consecutive nucleotides of any one of SEQ ID NO: 482-717.

[0016] In some embodiments, the oligonucleotide comprises at least 15 consecutive nucleotides of a sequence comprising any one of SEQ ID NOs: 246-481 and 778-795, optionally wherein the oligonucleotide comprises a sequence comprising any one of SEQ ID NOs: 246-481 and 778-795.

[0017] In some embodiments, the oligonucleotide comprises at least one modified internucleoside linkage. In some embodiments, the at least one modified internucleoside linkage is a phosphorothioate linkage.

[0018] In some embodiments, the oligonucleotide comprises one or more modified nucleosides, optionally wherein the one or more modified nucleosides are 2′-modified nucleosides.

[0019] In some embodiments, the oligonucleotide is a gapmer oligonucleotide that directs RNAse H-mediated cleavage of a DMPK mRNA transcript.

[0020] In some embodiments, the gapmer oligonucleotide comprises a 5′-X-Y-Z-3′ formula. In some embodiments,

[0021] X comprises 3-5 linked nucleosides, wherein at least one of the nucleosides in X is a 2′-modified nucleoside;

[0022] Y comprises 6-10 linked 2′-deoxyribonuclsides, wherein one or more of the nucleosides in the gap region Y is a modified nucleoside, and wherein one or more cytosines in the gap region Y are optionally 5-methyl-cytosines; and

[0023] Z comprises 3-5 linked nucleosides, wherein at least one of the nucleosides in Z is a 2′-modified nucleoside.

[0024] In some embodiments, each nucleoside in X and Z is a 2′modified nucleoside.

[0025] In some embodiments, the 2′ modified nucleotide is selected from the group consisting of: 2′-O-methyl (2′-O-Me), 2′-fluoro (2′-F), 2′-O-methoxyethyl (2′-MOE), and 2′, 4′-bicyclic nucleosides, further optionally wherein the 2′,4′-bicyclic nucleoside is selected from: locked nucleic acid (LNA), ethylene-bridged nucleic acid (ENA), and (S)-constrained ethyl-bridged nucleic acid (cEt).

[0026] In some embodiments, the muscle-targeting agent is covalently linked to the molecular payload via a cleavable linker. In some embodiments, the cleavable linker comprises a valine-citrulline dipeptide sequence. In some embodiments, the muscle-targeting agent is covalently linked to the molecular payload via a non-cleavable linker. In some embodiments, the non-cleavable linker is an alkane linker.

[0027] In some embodiments, the molecular payload is linked to the antibody via conjugation to a lysine residue or a cysteine residue of the antibody.

[0028] Other aspects of the present disclosure provide methods of inhibiting activity of DMPK in a cell. In some embodiments, the method comprises contacting the cell with the complex described herein in an amount effective for promoting internalization of the molecular payload to the cell. In some embodiments, the cell comprises a DMPK allele comprising a disease-associated-repeat.

[0029] Other aspects of the present disclosure provide methods of treating a subject having an expansion of a disease-associated-repeat of a DMPK allele that is associated with myotonic dystrophy type 1 (DM1). In some embodiments, the methods comprise administering to the subject an effective amount of the complex described herein.

### BRIEF DESCRIPTION OF THE DRAWINGS

[0030] FIG. 1 depicts a non-limiting schematic showing the effect of transfecting Hepa 1-6 cells with an antisense oligonucleotide that targets DMPK (control DMPK-ASO) on expression levels of DMPK relative to a vehicle transfection.

[0031] FIG. 2A depicts a non-limiting schematic showing an HIL-HPLC trace obtained during purification of a muscle targeting complex comprising an anti-transferrin receptor antibody covalently linked to a DMPK antisense oligonucleotide.

[0032] FIG. 2B depicts a non-limiting image of an SDS-PAGE analysis of a muscle targeting complex.

[0033] FIG. 3 depicts a non-limiting schematic showing the ability of a muscle targeting complex (DTX-C-008) comprising control DMPK-ASO to reduce expression levels of DMPK.

[0034] FIGS. 4A-4E depict non-limiting schematics showing the ability of a muscle targeting complex (DTX-C-008) comprising control DMPK-ASO to reduce expression levels of DMPK in mouse muscle tissues in vivo, relative to a vehicle experiment. (N=3 C57Bl/6 WT mice)

[0035] FIGS. 5A-5B depict non-limiting schematics showing the tissue selectivity of a muscle targeting complex (DTX-C-008) comprising control DMPK-ASO. The muscle targeting complex (DTX-C-008) comprising control DMPK-ASO does not reduce expression levels of DMPK in mouse brain or spleen tissues in vivo, relative to a vehicle experiment. (N=3 C57Bl/6 WT mice)

[0036] FIGS. 6A-6F depict non-limiting schematics showing the ability of a muscle targeting complex (DTX-C-008) comprising control DMPK-ASO to reduce expression levels of DMPK in mouse muscle tissues in vivo, relative to a vehicle experiment. (N=5 C57Bl/6 WT mice)

[0037] FIGS. 7A-7L depict non-limiting schematics showing the ability of a muscle targeting complex (DTX-C-012) comprising an anti-transferrin receptor antibody (a 15G11 antibody) and control DMPK-ASO to reduce expression levels of DMPK in cynomolgus monkey muscle tissues in vivo, relative to a vehicle experiment and compared to a naked DMPK ASO (control DMPK-ASO). (N=3 male cynomolgus monkeys)

[0038] FIGS. 8A-8B depict non-limiting schematics showing the ability of a muscle targeting complex (DTX-C-012) comprising an anti-transferrin receptor antibody (a 15G11 antibody) and control DMPK-ASO to reduce expression levels of DMPK in cynomolgus monkey smooth muscle tissues in vivo, relative to a vehicle experiment and compared to a naked DMPK ASO (control DMPK-ASO). (N=3 male cynomolgus monkeys).

[0039] FIGS. 9A-9D depict non-limiting schematics showing the tissue selectivity of a muscle targeting complex (DTX-C-012) comprising an anti-transferrin receptor antibody (a 15G11 antibody) and control DMPK-ASO. The muscle targeting complex comprising DMPK-ASO does not reduce expression levels of DMPK in cynomolgus monkey liver, kidney, brain, or spleen tissues in vivo, relative to a vehicle experiment. (N=3 male cynomolgus monkeys)

[0040] FIG. 10 shows normalized DMPK mRNA tissue expression levels across several tissue types in cynomolgus monkeys. (N=3 male cynomolgus monkeys)

[0041] FIGS. 11A-11B depict non-limiting schematics showing the ability of a muscle targeting complex (DTX-C-008) comprising control DMPK-ASO to reduce expression levels of DMPK in mouse muscle tissues in vivo for up to 28 days after dosing with DTX-C-008, relative to a vehicle experiment and compared to a naked DMPK ASO (control DMPK-ASO).

[0042] FIG. 12 shows that a single dose of a muscle targeting complex (DTX-C-012) comprising an anti-transferrin receptor antibody (a 15G11 antibody) and control DMPK-ASO is safe and tolerated in cynomolgus monkeys. (N=3 male cynomolgus monkeys)

[0043] FIGS. 13A-13B depict non-limiting schematics showing the ability of a muscle targeting complex (DTX-C-008) comprising control DMPK-ASO to reduce expression levels of DMPK in mouse muscle tissues in vivo for up to twelve weeks after dosing with DTX-C-008, relative to a vehicle treatment; and compared to a control complex (DTX-C-007) and naked DMPK ASO (control DMPK-ASO). (N=5 C57Bl/6 WT mice)

[0044] FIGS. 14A-14B depict non-limiting schematics showing the ability of a muscle-targeting complex (DTX-C-008) comprising control DMPK-ASO to target nuclear mutant DMPK RNA in a mouse model. (N=6 mice)

[0045] FIGS. 15A-15B depict non-limiting schematics showing the ability of a muscle-targeting complex (DTX-Actin) comprising an oligonucleotide that targets actin to dose-dependently reduce expression levels of actin and functional grades of myotonia in muscle tissues. (N=2 HSA^{LR} mice)

[0046] FIGS. 16A-16C depict non-limiting schematics showing that a muscle-targeting complex (DTX-C-008) is capable of significantly reducing the prolonged QTc interval in a mouse model for validation of the functional correction of arrhythmia in a DM1 cardiac model. (N=10 mice) FIG. 16A shows a schematic of the human DMPK construct driving the mouse model of DM1, FIG. 16B shows measured QRS intervals, and FIG. 16C shows measured QTc intervals.

[0047] FIGS. 17A-17B depict non-limiting schematics showing that a muscle-targeting complex (DTX-C-012) comprising an anti-transferrin receptor antibody (a 15G11 antibody) and control DMPK-ASO antisense oligonucleotide is capable of reducing expression levels of DMPK and correcting splicing of a DMPK-specific target gene (Bin1) in human cells from a DM1 patient. (N=3)

[0048] FIGS. 18A-18C depict non-limiting schematics showing the dose response of selected antisense oligonucleotides in DMPK knockdown in human DM1 myotubes. ControlDMPK-ASO was used as control. All tested oligonucleotides showed activity in DMPK knockdown. Statistical analysis: One-way ANOVA with Tukey's HSD post-hoc test vs. control DMPK-ASO treatment; *p<0.05, **p<0.01, ***p<0.001, ****p<0.0001.

[0049] FIGS. 19A-19B depict non-limiting schematics showing the dose response of selected antisense oligonucleotides in DMPK knockdown in non-human primate (NHP) DM1 myotubes. Control DMPK-ASO was used as control. All tested oligonucleotides showed activity in DMPK knockdown.

[0050] FIG. 20 is a graph showing DMPK knock down efficiency in non-human primate (NHP) cells or cells from human DM1 patients (DM1) of conjugates containing selected anti-TfR1 antibodies covalently conjugated to an antisense oligonucleotide targeting DMPK.

[0051] FIGS. 21A to 21B show binding of the different anti-TfR1 antibody formats to human (FIG. 21A) or cyno (FIG. 21B) transferrin receptor 1.

[0052] FIG. 22 shows binding of the different anti-TfR1 antibody formats to human transferrin receptor 2. An anti-TfR2 monoclonal antibody (OTI1B1) was used as control. None of the tested antibodies binds to TfR2.

[0053] FIG. 23 is a graph showing DMPK knock down efficiency in non-human primate (NHP) cells or cells from human DM1 patients (DM1) of conjugates containing an anti-TfR1 antibody described herein covalently conjugated to an antisense oligonucleotide targeting DMPK.

[0054] FIGS. 24A-24B show binding of oligonucleotide-conjugated or unconjugated anti-TfR to human TfR1 (hTfR1) and cynomolgus monkey TfR1 (cTfR1), as measured by ELISA. The anti-TfR is the one shown in Table 7. FIG. 24A shows the binding of the anti-TfR alone (EC50 26.6 nM) or in conjugates with a DMPK targeting oligo (EC50 8.2 nM) to hTfR1. FIG. 24B shows the binding of the anti-TfR alone (EC50 33.6 nM) or in conjugates with a DMPK targeting oligo (EC50 5.3 nM) to cTfR1.

[0055] FIG. 25 shows the quantified cellular uptake of anti-TfR Fab conjugates into rhabdomyosarcoma (RD) cells. The molecular payload in the tested conjugates are DMPK-targeting oligonucleotides and the uptake of the conjugates were facilitated by indicated anti-TfR Fabs. Conjugates having a negative control Fab (anti-mouse TfR) or a positive control Fab (anti-human TfR1) are also included this assay. Cells were incubated with indicated conjugate at a concentration of 100 nM for 4 hours. Cellular uptake was measured by mean Cypher5e fluorescence. The anti-TfR is the one shown in Table 7.

[0056] FIG. 26 shows DMPK expression in RD cells treated with various concentrations of conjugates containing an anti-TfR antibody (the anti-TfR in Table 7) conjugated to a DMPK-targeting oligonucleotide (control DMPK-ASO). The duration treatment was 3 days. Control DMPK-ASO delivered using transfection agents were used as control.

[0057] FIG. 27 shows the serum stability of the linker used for linking an anti-TfR antibody and a molecular payload (e.g., an oligonucleotide) in various species over time after intravenous administration.

[0058] FIG. 28 shows DMPK expression in RD cells treated with DMPK-targeting oligonucleotides relative to cells treated with PBS. The duration of treatment was 3 days. DMPK-targeting oligonucleotides were delivered to the cells as free oligonucleotides (gymnotic uptake, “free”) or with transfection reagent (“trans”).

[0059] FIG. 29 shows results of splicing correction in Atp2a1 by an anti-TfR1 antibody-oligonucleotide conjugate (Ab-ASO) in the HSA-LR mouse model of DM1, measured in the gastrocnemius muscle. The anti-TfR used is RI7 217 and the oligonucleotide is targeting skeletal actin.

[0060] FIGS. 30A-30C show splicing correction in more than 30 different RNAs related to DM1, measured in the gastrocnemius muscle of HSA-LR mice treated with anti-TfR1 antibody-oligonucleotide (Ab-ASO) conjugate or saline. The anti-TfR used is RI7 217 and the oligonucleotide is targeting skeletal actin.

[0061] FIG. 31 shows splicing derangement in quadriceps, gastrocnemius, or tibialis anterior muscles of HSA-LR mice treated with anti-TfR1 antibody-oligonucleotide conjugate (Ab-ASO) or saline. The data represent composite splicing derangement measured in the more than 30 RNAs shown in FIGS. 30A-30C.

[0062] FIG. 32 shows myotonia grade measured in quadriceps, gastrocnemius, and tibialis anterior muscles of HSA-LR mice treated with saline, unconjugated oligonucleotide (ASO), or anti-TfR1 antibody-oligonucleotide conjugate (Ab-ASO). Myotonia was measured by electromyography (EMG), and graded 0, 1, 2, or 3 based on the frequency of myotonic discharge.

[0063] FIGS. 33A-33D show in vivo activity of conjugates containing an anti-TfR Fab′ (a control anti-TfR Fab′ or an anti-TfR Fab′ comprising a HC of SEQ ID NO: 777 and a LC of SEQ ID NO: 212) conjugated to DMPK-targeting oligonucleotide in reducing DMPK mRNA expression in mice expressing human TfR1 (hTfR1 knock-in mice). Remaining DMPK mRNA levels were measured 14 days post first dose in the tibialis anterior (FIG. 33A), gastrocnemius (FIG. 33B), heart (FIG. 33C), and diaphragm (FIG. 33D), of the mice. In FIGS. 33A-33D, p<0.05 (*); p<0.01 (**); p<0.001 (***); p<0.0001 (****).

[0064] FIGS. 34A-34C show that conjugates containing anti-TfR conjugated to DMPK-targeting oligonucleotide corrected splicing and reduced foci in CM-DM1-32F primary cells expressing a DMPK mutant mRNA containing 380 GTG repeats. FIG. 34A shows that the conjugates reduced mutant DMPK mRNA expression. FIG. 34B shows that the conjugates corrected BIN1 Exon 11 splicing. FIG. 34C shows images of a fluorescence in situ hybridization (FISH) analysis and quantification of the images, demonstrating that the conjugated reduced nuclear foci formed by the mutant DMPK mRNA.

### DETAILED DESCRIPTION

[0065] Aspects of the disclosure relate to a recognition that while certain molecular payloads (e.g., oligonucleotides, peptides, small molecules) can have beneficial effects in muscle cells, it has proven challenging to effectively target such cells. As described herein, the present disclosure provides complexes comprising muscle-targeting agents covalently linked to molecular payloads in order to overcome such challenges. In some embodiments, the complexes are particularly useful for delivering molecular payloads that inhibit the expression or activity of target genes in muscle cells, e.g., in a subject having or suspected of having a rare muscle disease. For example, in some embodiments, complexes are provided for targeting a DMPK allele that comprises an expanded disease-associated-repeat to treat subjects having DM1. In some embodiments, complexes provided herein may comprise oligonucleotides that inhibit expression of a DMPK allele comprising an expanded disease-associated-repeat. As another example, complexes may comprise oligonucleotides that interfere with the binding of a disease-associated DMPK mRNA to a muscleblind-like protein (e.g., MBNL1, 2, and/or (e.g., and) 3), thereby reducing a toxic effect of a disease-associated DMPK allele. In some embodiments, synthetic nucleic acid payloads (e.g., DNA or RNA payloads) may be used that express one or more proteins that reduce a toxic effect of a disease-associated DMPK allele. In some embodiments, complexes may comprise molecular payloads of synthetic cDNAs and/or (e.g., and) synthetic mRNAs, e.g., that express one or more muscleblind-like-proteins (e.g., MBNL1, 2, and/or (e.g., and) 3) or fragments thereof. In some embodiments, complexes may comprise molecular payloads such as guide molecules (e.g., guide RNAs) that are capable of targeting nucleic acid programmable nucleases (e.g., Cas9) to a sequence at or near a disease-associated repeat sequence of DMPK. In some embodiments, such nucleic programmable nucleases could be used to cleave part or all of a disease-associated repeat sequence from a DMPK gene.

[0066] Further aspects of the disclosure, including a description of defined terms, are provided below.

### I. Definitions

[0067] Administering: As used herein, the terms “administering” or “administration” means to provide a complex to a subject in a manner that is physiologically and/or (e.g., and) pharmacologically useful (e.g., to treat a condition in the subject).

[0068] Approximately: As used herein, the term “approximately” or “about,” as applied to one or more values of interest, refers to a value that is similar to a stated reference value. In certain embodiments, the term “approximately” or “about” refers to a range of values that fall within 15%, 14%, 13%, 12%, 11%, 10%, 9%, 8%, 7%, 6%, 5%, 4%, 3%, 2%, 1%, or less in either direction (greater than or less than) of the stated reference value unless otherwise stated or otherwise evident from the context (except where such number would exceed 100% of a possible value).

[0069] Antibody: As used herein, the term “antibody” refers to a polypeptide that includes at least one immunoglobulin variable domain or at least one antigenic determinant, e.g., paratope that specifically binds to an antigen. In some embodiments, an antibody is a full-length antibody. In some embodiments, an antibody is a chimeric antibody. In some embodiments, an antibody is a humanized antibody. However, in some embodiments, an antibody is a Fab fragment, a F(ab′), a F(ab′)2 fragment, a Fv fragment or a scFv fragment. In some embodiments, an antibody is a nanobody derived from a camelid antibody or a nanobody derived from shark antibody. In some embodiments, an antibody is a diabody. In some embodiments, an antibody comprises a framework having a human germline sequence. In another embodiment, an antibody comprises a heavy chain constant domain selected from the group consisting of IgG, IgG1, IgG2, IgG2A, IgG2B, IgG2C, IgG3, IgG4, IgA1, IgA2, IgD, IgM, and IgE constant domains. In some embodiments, an antibody comprises a heavy (H) chain variable region (abbreviated herein as VH), and/or (e.g., and) a light (L) chain variable region (abbreviated herein as VL). In some embodiments, an antibody comprises a constant domain, e.g., an Fc region. An immunoglobulin constant domain refers to a heavy or light chain constant domain. Human IgG heavy chain and light chain constant domain amino acid sequences and their functional variations are known. With respect to the heavy chain, in some embodiments, the heavy chain of an antibody described herein can be an alpha (α), delta (Δ), epsilon (ε), gamma (γ) or mu (μ) heavy chain. In some embodiments, the heavy chain of an antibody described herein can comprise a human alpha (α), delta (Δ), epsilon (ε), gamma (γ) or mu (μ) heavy chain. In a particular embodiment, an antibody described herein comprises a human gamma 1 CH1, CH2, and/or (e.g., and) CH3 domain. In some embodiments, the amino acid sequence of the VH domain comprises the amino acid sequence of a human gamma (γ) heavy chain constant region, such as any known in the art. Non-limiting examples of human constant region sequences have been described in the art, e.g., see U.S. Pat. No. 5,693,780 and Kabat E A et al., (1991) supra. In some embodiments, the VH domain comprises an amino acid sequence that is at least 70%, 75%, 80%, 85%, 90%, 95%, 98%, or at least 99% identical to any of the variable chain constant regions provided herein. In some embodiments, an antibody is modified, e.g., modified via glycosylation, phosphorylation, sumoylation, and/or (e.g., and) methylation. In some embodiments, an antibody is a glycosylated antibody, which is conjugated to one or more sugar or carbohydrate molecules. In some embodiments, the one or more sugar or carbohydrate molecule are conjugated to the antibody via N-glycosylation, O-glycosylation, C-glycosylation, glypiation (GPI anchor attachment), and/or (e.g., and) phosphoglycosylation. In some embodiments, the one or more sugar or carbohydrate molecule are monosaccharides, disaccharides, oligosaccharides, or glycans. In some embodiments, the one or more sugar or carbohydrate molecule is a branched oligosaccharide or a branched glycan. In some embodiments, the one or more sugar or carbohydrate molecule includes a mannose unit, a glucose unit, an N-acetylglucosamine unit, an N-acetylgalactosamine unit, a galactose unit, a fucose unit, or a phospholipid unit. In some embodiments, an antibody is a construct that comprises a polypeptide comprising one or more antigen binding fragments of the disclosure linked to a linker polypeptide or an immunoglobulin constant domain. Linker polypeptides comprise two or more amino acid residues joined by peptide bonds and are used to link one or more antigen binding portions. Examples of linker polypeptides have been reported (see e.g., Holliger, P., et al. (1993) Proc. Natl. Acad. Sci. USA 90:6444-6448; Poljak, R. J., et al. (1994) Structure 2:1121-1123). Still further, an antibody may be part of a larger immunoadhesion molecule, formed by covalent or noncovalent association of the antibody or antibody portion with one or more other proteins or peptides. Examples of such immunoadhesion molecules include use of the streptavidin core region to make a tetrameric scFv molecule (Kipriyanov, S. M., et al. (1995) Human Antibodies and Hybridomas 6:93-101) and use of a cysteine residue, a marker peptide and a C-terminal polyhistidine tag to make bivalent and biotinylated scFv molecules (Kipriyanov, S. M., et al. (1994) Mol. Immunol. 31:1047-1058).

[0070] CDR: As used herein, the term “CDR” refers to the complementarity determining region within antibody variable sequences. There are three CDRs in each of the variable regions of the heavy chain and the light chain, which are designated CDR1, CDR2 and CDR3, for each of the variable regions. The term “CDR set” as used herein refers to a group of three CDRs that occur in a single variable region capable of binding the antigen. The exact boundaries of these CDRs have been defined differently according to different systems. The system described by Kabat (Kabat et al., Sequences of Proteins of Immunological Interest (National Institutes of Health, Bethesda, Md. (1987) and (1991)) not only provides an unambiguous residue numbering system applicable to any variable region of an antibody, but also provides precise residue boundaries defining the three CDRs. These CDRs may be referred to as Kabat CDRs. Sub-portions of CDRs may be designated as L1, L2 and L3 or H1, H2 and H3 where the “L” and the “H” designates the light chain and the heavy chains regions, respectively. These regions may be referred to as Chothia CDRs, which have boundaries that overlap with Kabat CDRs. Other boundaries defining CDRs overlapping with the Kabat CDRs have been described by Padlan (FASEB J. 9:133-139 (1995)) and MacCallum (J Mol Biol 262(5):732-45 (1996)). Still other CDR boundary definitions may not strictly follow one of the above systems, but will nonetheless overlap with the Kabat CDRs, although they may be shortened or lengthened in light of prediction or experimental findings that particular residues or groups of residues or even entire CDRs do not significantly impact antigen binding. The methods used herein may utilize CDRs defined according to any of these systems, although preferred embodiments use Kabat or Chothia defined CDRs.

[0071] CDR-grafted antibody: The term “CDR-grafted antibody” refers to antibodies which comprise heavy and light chain variable region sequences from one species but in which the sequences of one or more of the CDR regions of VH and/or (e.g., and) VL are replaced with CDR sequences of another species, such as antibodies having murine heavy and light chain variable regions in which one or more of the murine CDRs (e.g., CDR3) has been replaced with human CDR sequences.

[0072] Chimeric antibody: The term “chimeric antibody” refers to antibodies which comprise heavy and light chain variable region sequences from one species and constant region sequences from another species, such as antibodies having murine heavy and light chain variable regions linked to human constant regions.

[0073] Complementary: As used herein, the term “complementary” refers to the capacity for precise pairing between two nucleotides or two sets of nucleotides. In particular, complementary is a term that characterizes an extent of hydrogen bond pairing that brings about binding between two nucleotides or two sets of nucleotides. For example, if a base at one position of an oligonucleotide is capable of hydrogen bonding with a base at the corresponding position of a target nucleic acid (e.g., an mRNA), then the bases are considered to be complementary to each other at that position. Base pairings may include both canonical Watson-Crick base pairing and non-Watson-Crick base pairing (e.g., Wobble base pairing and Hoogsteen base pairing). For example, in some embodiments, for complementary base pairings, adenosine-type bases (A) are complementary to thymidine-type bases (T) or uracil-type bases (U), that cytosine-type bases (C) are complementary to guanosine-type bases (G), and that universal bases such as 3-nitropyrrole or 5-nitroindole can hybridize to and are considered complementary to any A, C, U, or T. Inosine (I) has also been considered in the art to be a universal base and is considered complementary to any A, C, U or T.

[0074] Conservative amino acid substitution: As used herein, a “conservative amino acid substitution” refers to an amino acid substitution that does not alter the relative charge or size characteristics of the protein in which the amino acid substitution is made. Variants can be prepared according to methods for altering polypeptide sequence known to one of ordinary skill in the art such as are found in references which compile such methods, e.g. Molecular Cloning: A Laboratory Manual, J. Sambrook, et al., eds., Fourth Edition, Cold Spring Harbor Laboratory Press, Cold Spring Harbor, N.Y., 2012, or Current Protocols in Molecular Biology, F. M. Ausubel, et al., eds., John Wiley & Sons, Inc., New York. Conservative substitutions of amino acids include substitutions made amongst amino acids within the following groups: (a) M, I, L, V; (b) F, Y, W; (c) K, R, H; (d) A, G; (e) S, T; (f) Q, N; and (g) E, D.

[0075] Covalently linked: As used herein, the term “covalently linked” refers to a characteristic of two or more molecules being linked together via at least one covalent bond. In some embodiments, two molecules can be covalently linked together by a single bond, e.g., a disulfide bond or disulfide bridge, that serves as a linker between the molecules. However, in some embodiments, two or more molecules can be covalently linked together via a molecule that serves as a linker that joins the two or more molecules together through multiple covalent bonds. In some embodiments, a linker may be a cleavable linker. However, in some embodiments, a linker may be a non-cleavable linker.

[0076] Cross-reactive: As used herein and in the context of a targeting agent (e.g., antibody), the term “cross-reactive,” refers to a property of the agent being capable of specifically binding to more than one antigen of a similar type or class (e.g., antigens of multiple homologs, paralogs, or orthologs) with similar affinity or avidity. For example, in some embodiments, an antibody that is cross-reactive against human and non-human primate antigens of a similar type or class (e.g., a human transferrin receptor and non-human primate transferrin receptor) is capable of binding to the human antigen and non-human primate antigens with a similar affinity or avidity. In some embodiments, an antibody is cross-reactive against a human antigen and a rodent antigen of a similar type or class. In some embodiments, an antibody is cross-reactive against a rodent antigen and a non-human primate antigen of a similar type or class. In some embodiments, an antibody is cross-reactive against a human antigen, a non-human primate antigen, and a rodent antigen of a similar type or class.

[0077] Disease-associated-repeat: As used herein, the term “disease-associated-repeat” refers to a repeated nucleotide sequence at a genomic location for which the number of units of the repeated nucleotide sequence is correlated with and/or (e.g., and) directly or indirectly contributes to, or causes, genetic disease. Each repeating unit of a disease associated repeat may be 2, 3, 4, 5 or more nucleotides in length. For example, in some embodiments, a disease associated repeat is a dinucleotide repeat. In some embodiments, a disease associated repeat is a trinucleotide repeat. In some embodiments, a disease associated repeat is a tetranucleotide repeat. In some embodiments, a disease associated repeat is a pentanucleotide repeat. In some embodiments, embodiments, the disease-associated-repeat comprises CAG repeats, CTG repeats, CUG repeats, CGG repeats, CCTG repeats, or a nucleotide complement of any thereof. In some embodiments, a disease-associated-repeat is in a non-coding portion of a gene. However, in some embodiments, a disease-associated-repeat is in a coding region of a gene. In some embodiments, a disease-associated-repeat is expanded from a normal state to a length that directly or indirectly contributes to, or causes, genetic disease. In some embodiments, a disease-associated-repeat is in RNA (e.g., an RNA transcript). In some embodiments, a disease-associated-repeat is in DNA (e.g., a chromosome, a plasmid). In some embodiments, a disease-associated-repeat is expanded in a chromosome of a germline cell. In some embodiments, a disease-associated-repeat is expanded in a chromosome of a somatic cell. In some embodiments, a disease-associated-repeat is expanded to a number of repeating units that is associated with congenital onset of disease. In some embodiments, a disease-associated-repeat is expanded to a number of repeating units that is associated with childhood onset of disease. In some embodiments, a disease-associated-repeat is expanded to a number of repeating units that is associated with adult onset of disease.

[0078] DMPK: As used herein, the term “DMPK” refers to a gene that encodes myotonin-protein kinase (also known as myotonic dystrophy protein kinase or dystrophia myotonica protein kinase), a serine/threonine protein kinase. Substrates for this enzyme may include myogenin, the beta-subunit of the L-type calcium channels, and phospholemman. In some embodiments, DMPK may be a human (Gene ID: 1760), non-human primate (e.g., Gene ID: 456139, Gene ID: 715328), or rodent gene (e.g., Gene ID: 13400). In humans, a CTG repeat expansion in the 3′ non-coding, untranslated region of DMPK is associated with myotonic dystrophy type I (DM1). In addition, multiple human transcript variants (e.g., as annotated under GenBank RefSeq Accession Numbers: NM_001081563.2, NM_004409.4, NM_001081560.2, NM_001081562.2, NM_001288764.1, NM_001288765.1, and NM_001288766.1) have been characterized that encode different protein isoforms.

[0079] DMPK allele: As used herein, the term “DMPK allele” refers to any one of alternative forms (e.g., wild-type or mutant forms) of a DMPK gene. In some embodiments, a DMPK allele may encode for wild-type myotonin-protein kinase that retains its normal and typical functions. In some embodiments, a DMPK allele may comprise one or more disease-associated-repeat expansions. In some embodiments, normal subjects have two DMPK alleles comprising in the range of 5 to 37 repeat units. In some embodiments, the number of CTG repeat units in subjects having DM1 is in the range of ˜50 to ˜3,000+ with higher numbers of repeats leading to an increased severity of disease. In some embodiments, mildly affected DM1 subjects have at least one DMPK allele having in the range of 50 to 150 repeat units. In some embodiments, subjects with classic DM1 have at least one DMPK allele having in the range of 100 to 1,000 or more repeat units. In some embodiments, subjects having DM1 with congenital onset may have at least one DMPK allele comprising more than 2,000 repeat units.

[0080] Framework: As used herein, the term “framework” or “framework sequence” refers to the remaining sequences of a variable region minus the CDRs. Because the exact definition of a CDR sequence can be determined by different systems, the meaning of a framework sequence is subject to correspondingly different interpretations. The six CDRs (CDR-L1, CDR-L2, and CDR-L3 of light chain and CDR-H1, CDR-H2, and CDR-H3 of heavy chain) also divide the framework regions on the light chain and the heavy chain into four sub-regions (FR1, FR2, FR3 and FR4) on each chain, in which CDR1 is positioned between FR1 and FR2, CDR2 between FR2 and FR3, and CDR3 between FR3 and FR4. Without specifying the particular sub-regions as FR1, FR2, FR3 or FR4, a framework region, as referred by others, represents the combined FRs within the variable region of a single, naturally occurring immunoglobulin chain. As used herein, a FR represents one of the four sub-regions, and FRs represents two or more of the four sub-regions constituting a framework region. Human heavy chain and light chain acceptor sequences are known in the art. In one embodiment, the acceptor sequences known in the art may be used in the antibodies disclosed herein.

[0081] Human antibody: The term “human antibody”, as used herein, is intended to include antibodies having variable and constant regions derived from human germline immunoglobulin sequences. The human antibodies of the disclosure may include amino acid residues not encoded by human germline immunoglobulin sequences (e.g., mutations introduced by random or site-specific mutagenesis in vitro or by somatic mutation in vivo), for example in the CDRs and in particular CDR3. However, the term “human antibody”, as used herein, is not intended to include antibodies in which CDR sequences derived from the germline of another mammalian species, such as a mouse, have been grafted onto human framework sequences.

[0082] Humanized antibody: The term “humanized antibody” refers to antibodies which comprise heavy and light chain variable region sequences from a non-human species (e.g., a mouse) but in which at least a portion of the VH and/or (e.g., and) VL sequence has been altered to be more “human-like”, i.e., more similar to human germline variable sequences. One type of humanized antibody is a CDR-grafted antibody, in which human CDR sequences are introduced into non-human VH and VL sequences to replace the corresponding nonhuman CDR sequences. In one embodiment, humanized anti-transferrin receptor antibodies and antigen binding portions are provided. Such antibodies may be generated by obtaining murine anti-transferrin receptor monoclonal antibodies using traditional hybridoma technology followed by humanization using in vitro genetic engineering, such as those disclosed in Kasaian et al PCT publication No. WO 2005/123126 A2.

[0083] Internalizing cell surface receptor: As used herein, the term, “internalizing cell surface receptor” refers to a cell surface receptor that is internalized by cells, e.g., upon external stimulation, e.g., ligand binding to the receptor. In some embodiments, an internalizing cell surface receptor is internalized by endocytosis. In some embodiments, an internalizing cell surface receptor is internalized by clathrin-mediated endocytosis. However, in some embodiments, an internalizing cell surface receptor is internalized by a clathrin-independent pathway, such as, for example, phagocytosis, macropinocytosis, caveolae- and raft-mediated uptake or constitutive clathrin-independent endocytosis. In some embodiments, the internalizing cell surface receptor comprises an intracellular domain, a transmembrane domain, and/or (e.g., and) an extracellular domain, which may optionally further comprise a ligand-binding domain. In some embodiments, a cell surface receptor becomes internalized by a cell after ligand binding. In some embodiments, a ligand may be a muscle-targeting agent or a muscle-targeting antibody. In some embodiments, an internalizing cell surface receptor is a transferrin receptor.

[0084] Isolated antibody: An “isolated antibody”, as used herein, is intended to refer to an antibody that is substantially free of other antibodies having different antigenic specificities (e.g., an isolated antibody that specifically binds transferrin receptor is substantially free of antibodies that specifically bind antigens other than transferrin receptor). An isolated antibody that specifically binds transferrin receptor complex may, however, have cross-reactivity to other antigens, such as transferrin receptor molecules from other species. Moreover, an isolated antibody may be substantially free of other cellular material and/or (e.g., and) chemicals.

[0085] Kabat numbering: The terms “Kabat numbering”, “Kabat definitions and “Kabat labeling” are used interchangeably herein. These terms, which are recognized in the art, refer to a system of numbering amino acid residues which are more variable (i.e. hypervariable) than other amino acid residues in the heavy and light chain variable regions of an antibody, or an antigen binding portion thereof (Kabat et al. (1971) Ann. NY Acad, Sci. 190:382-391 and, Kabat, E. A., et al. (1991) Sequences of Proteins of Immunological Interest, Fifth Edition, U.S. Department of Health and Human Services, NIH Publication No. 91-3242). For the heavy chain variable region, the hypervariable region ranges from amino acid positions 31 to 35 for CDR1, amino acid positions 50 to 65 for CDR2, and amino acid positions 95 to 102 for CDR3. For the light chain variable region, the hypervariable region ranges from amino acid positions 24 to 34 for CDR1, amino acid positions 50 to 56 for CDR2, and amino acid positions 89 to 97 for CDR3.

[0086] Molecular payload: As used herein, the term “molecular payload” refers to a molecule or species that functions to modulate a biological outcome. In some embodiments, a molecular payload is linked to, or otherwise associated with a muscle-targeting agent. In some embodiments, the molecular payload is a small molecule, a protein, a peptide, a nucleic acid, or an oligonucleotide. In some embodiments, the molecular payload functions to modulate the transcription of a DNA sequence, to modulate the expression of a protein, or to modulate the activity of a protein. In some embodiments, the molecular payload is an oligonucleotide that comprises a strand having a region of complementarity to a target gene.

[0087] Muscle-targeting agent: As used herein, the term, “muscle-targeting agent,” refers to a molecule that specifically binds to an antigen expressed on muscle cells. The antigen in or on muscle cells may be a membrane protein, for example an integral membrane protein or a peripheral membrane protein. Typically, a muscle-targeting agent specifically binds to an antigen on muscle cells that facilitates internalization of the muscle-targeting agent (and any associated molecular payload) into the muscle cells. In some embodiments, a muscle-targeting agent specifically binds to an internalizing, cell surface receptor on muscles and is capable of being internalized into muscle cells through receptor mediated internalization. In some embodiments, the muscle-targeting agent is a small molecule, a protein, a peptide, a nucleic acid (e.g., an aptamer), or an antibody. In some embodiments, the muscle-targeting agent is linked to a molecular payload.

[0088] Muscle-targeting antibody: As used herein, the term, “muscle-targeting antibody,” refers to a muscle-targeting agent that is an antibody that specifically binds to an antigen found in or on muscle cells. In some embodiments, a muscle-targeting antibody specifically binds to an antigen on muscle cells that facilitates internalization of the muscle-targeting antibody (and any associated molecular payment) into the muscle cells. In some embodiments, the muscle-targeting antibody specifically binds to an internalizing, cell surface receptor present on muscle cells. In some embodiments, the muscle-targeting antibody is an antibody that specifically binds to a transferrin receptor.

[0089] Myotonic dystrophy (DM): As used herein, the term “Myotonic dystrophy (DM)” refers to a genetic disease caused by mutations in the DMPK gene or CNBP (ZNF9) gene that is characterized by muscle loss, muscle weakening, and muscle function. Two types of the disease, myotonic dystrophy type 1 (DM1) and myotonic dystrophy type 2 (DM2), have been described. DM1 is associated with an expansion of a CTG trinucleotide repeat in the 3′ non-coding region of DMPK. DM2 is associated with an expansion of a CCTG tetranucleotide repeat in the first intron of ZNF9. In both DM1 and DM2, the nucleotide expansions lead to toxic RNA repeats capable of forming hairpin structures that bind critical intracellular proteins, e.g., muscleblind-like proteins, with high affinity. Myotonic dystrophy, the genetic basis for the disease, and related symptoms are described in the art (see, e.g. Thornton, C. A., “Myotonic Dystrophy” Neurol Clin. (2014), 32(3): 705-719.; and Konieczny et al. “Myotonic dystrophy: candidate small molecule therapeutics” Drug Discovery Today (2017), 22:11.) In some embodiments, subjects are born with a variation of DM1 called congenital myotonic dystrophy. Symptoms of congenital myotonic dystrophy are present from birth and include weakness of all muscles, breathing problems, clubfeet, developmental delays and intellectual disabilities. DM1 is associated with Online Mendelian Inheritance in Man (OMIM) Entry #160900. DM2 is associated with OMIM Entry #602668.

[0090] Oligonucleotide: As used herein, the term “oligonucleotide” refers to an oligomeric nucleic acid compound of up to 200 nucleotides in length. Examples of oligonucleotides include, but are not limited to, RNAi oligonucleotides (e.g., siRNAs, shRNAs), microRNAs, gapmers, mixmers, phosphorodiamidite morpholinos, peptide nucleic acids, aptamers, guide nucleic acids (e.g., Cas9 guide RNAs), etc. Oligonucleotides may be single-stranded or double-stranded. In some embodiments, an oligonucleotide may comprise one or more modified nucleotides (e.g. 2′-O-methyl sugar modifications, purine or pyrimidine modifications). In some embodiments, an oligonucleotide may comprise one or more modified internucleotide linkage. In some embodiments, an oligonucleotide may comprise one or more phosphorothioate linkages, which may be in the Rp or Sp stereochemical conformation.

[0091] Recombinant antibody: The term “recombinant human antibody”, as used herein, is intended to include all human antibodies that are prepared, expressed, created or isolated by recombinant means, such as antibodies expressed using a recombinant expression vector transfected into a host cell (described in more details in this disclosure), antibodies isolated from a recombinant, combinatorial human antibody library (Hoogenboom H. R., (1997) TIB Tech. 15:62-70; Azzazy H., and Highsmith W. E., (2002) Clin. Biochem. 35:425-445; Gavilondo J. V., and Larrick J. W. (2002) BioTechniques 29:128-145; Hoogenboom H., and Chames P. (2000) Immunology Today 21:371-378), antibodies isolated from an animal (e.g., a mouse) that is transgenic for human immunoglobulin genes (see e.g., Taylor, L. D., et al. (1992) Nucl. Acids Res. 20:6287-6295; Kellermann S-A., and Green L. L. (2002) Current Opinion in Biotechnology 13:593-597; Little M. et al (2000) Immunology Today 21:364-370) or antibodies prepared, expressed, created or isolated by any other means that involves splicing of human immunoglobulin gene sequences to other DNA sequences. Such recombinant human antibodies have variable and constant regions derived from human germline immunoglobulin sequences. In certain embodiments, however, such recombinant human antibodies are subjected to in vitro mutagenesis (or, when an animal transgenic for human Ig sequences is used, in vivo somatic mutagenesis) and thus the amino acid sequences of the VH and VL regions of the recombinant antibodies are sequences that, while derived from and related to human germline VH and VL sequences, may not naturally exist within the human antibody germline repertoire in vivo. One embodiment of the disclosure provides fully human antibodies capable of binding human transferrin receptor which can be generated using techniques well known in the art, such as, but not limited to, using human Ig phage libraries such as those disclosed in Jermutus et al., PCT publication No. WO 2005/007699 A2.

[0092] Region of complementarity: As used herein, the term “region of complementarity” refers to a nucleotide sequence, e.g., of a oligonucleotide, that is sufficiently complementary to a cognate nucleotide sequence, e.g., of a target nucleic acid, such that the two nucleotide sequences are capable of annealing to one another under physiological conditions (e.g., in a cell). In some embodiments, a region of complementarity is fully complementary to a cognate nucleotide sequence of target nucleic acid. However, in some embodiments, a region of complementarity is partially complementary to a cognate nucleotide sequence of target nucleic acid (e.g., at least 80%, 90%, 95% or 99% complementarity). In some embodiments, a region of complementarity contains 1, 2, 3, or 4 mismatches compared with a cognate nucleotide sequence of a target nucleic acid.

[0093] Specifically binds: As used herein, the term “specifically binds” refers to the ability of a molecule to bind to a binding partner with a degree of affinity or avidity that enables the molecule to be used to distinguish the binding partner from an appropriate control in a binding assay or other binding context. With respect to an antibody, the term, “specifically binds”, refers to the ability of the antibody to bind to a specific antigen with a degree of affinity or avidity, compared with an appropriate reference antigen or antigens, that enables the antibody to be used to distinguish the specific antigen from others, e.g., to an extent that permits preferential targeting to certain cells, e.g., muscle cells, through binding to the antigen, as described herein. In some embodiments, an antibody specifically binds to a target if the antibody has a K_{D} for binding the target of at least about 10⁻⁴ M, 10⁻⁵ M, 10⁻⁶ M, 10⁻⁷ M, 10⁻⁸ M, 10⁻⁹ M, 10⁻¹⁰ M, 10⁻¹¹ M, 10⁻¹² M, 10⁻¹³ M, or less. In some embodiments, an antibody specifically binds to the transferrin receptor, e.g., an epitope of the apical domain of transferrin receptor.

[0094] Subject: As used herein, the term “subject” refers to a mammal. In some embodiments, a subject is non-human primate, or rodent. In some embodiments, a subject is a human. In some embodiments, a subject is a patient, e.g., a human patient that has or is suspected of having a disease. In some embodiments, the subject is a human patient who has or is suspected of having a disease resulting from a disease-associated-repeat expansion, e.g., in a DMPK allele.

[0095] Transferrin receptor: As used herein, the term, “transferrin receptor” (also known as TFRC, CD71, p90, TFR, or TFR1) refers to an internalizing cell surface receptor that binds transferrin to facilitate iron uptake by endocytosis. In some embodiments, a transferrin receptor may be of human (NCBI Gene ID 7037), non-human primate (e.g., NCBI Gene ID 711568 or NCBI Gene ID 102136007), or rodent (e.g., NCBI Gene ID 22042) origin. In addition, multiple human transcript variants have been characterized that encoded different isoforms of the receptor (e.g., as annotated under GenBank RefSeq Accession Numbers: NP_001121620.1, NP_003225.2, NP_001300894.1, and NP_001300895.1).

[0096] 2′-modified nucleoside: As used herein, the terms “2′-modified nucleoside” and “2′-modified ribonucleoside” are used interchangeably and refer to a nucleoside having a sugar moiety modified at the 2′ position. In some embodiments, the 2′-modified nucleoside is a 2′-4′ bicyclic nucleoside, where the 2′ and 4′ positions of the sugar are bridged (e.g., via a methylene, an ethylene, or a (S)-constrained ethyl bridge). In some embodiments, the 2′-modified nucleoside is a non-bicyclic 2′-modified nucleoside, e.g., where the 2′ position of the sugar moiety is substituted. Non-limiting examples of 2′-modified nucleosides include: 2′-deoxy, 2′-fluoro (2′-F), 2′-O-methyl (2′-O-Me), 2′-O-methoxyethyl (2′-MOE), 2′-O-aminopropyl (2′-O-AP), 2′-O-dimethylaminoethyl (2′-O-DMAOE), 2′-O-dimethylaminopropyl (2′-O-DMAP), 2′-O-dimethylaminoethyloxyethyl (2′-O-DMAEOE), 2′-O—N-methylacetamido (2′-O-NMA), locked nucleic acid (LNA, methylene-bridged nucleic acid), ethylene-bridged nucleic acid (ENA), and (S)-constrained ethyl-bridged nucleic acid (cEt). In some embodiments, the 2′-modified nucleosides described herein are high-affinity modified nucleotides and oligonucleotides comprising the 2′-modified nucleotides have increased affinity to a target sequences, relative to an unmodified oligonucleotide. Examples of structures of 2′-modified nucleosides are provided below:

[chemical structure]

### II. Complexes

[0097] Provided herein are complexes that comprise a targeting agent, e.g. an antibody, covalently linked to a molecular payload. In some embodiments, a complex comprises a muscle-targeting antibody covalently linked to a oligonucleotide. A complex may comprise an antibody that specifically binds a single antigenic site or that binds to at least two antigenic sites that may exist on the same or different antigens.

[0098] A complex may be used to modulate the activity or function of at least one gene, protein, and/or (e.g., and) nucleic acid. In some embodiments, the molecular payload present with a complex is responsible for the modulation of a gene, protein, and/or (e.g., and) nucleic acids. A molecular payload may be a small molecule, protein, nucleic acid, oligonucleotide, or any molecular entity capable of modulating the activity or function of a gene, protein, and/or (e.g., and) nucleic acid in a cell. In some embodiments, a molecular payload is an oligonucleotide that targets a disease-associated repeat in muscle cells.

[0099] In some embodiments, a complex comprises a muscle-targeting agent, e.g. an anti-transferrin receptor antibody, covalently linked to a molecular payload, e.g. an antisense oligonucleotide that targets a disease-associated repeat, e.g. DMPK allele.

[0100] A. Muscle-Targeting Agents

[0101] Some aspects of the disclosure provide muscle-targeting agents, e.g., for delivering a molecular payload to a muscle cell. In some embodiments, such muscle-targeting agents are capable of binding to a muscle cell, e.g., via specifically binding to an antigen on the muscle cell, and delivering an associated molecular payload to the muscle cell. In some embodiments, the molecular payload is bound (e.g., covalently bound) to the muscle targeting agent and is internalized into the muscle cell upon binding of the muscle targeting agent to an antigen on the muscle cell, e.g., via endocytosis. It should be appreciated that various types of muscle-targeting agents may be used in accordance with the disclosure. For example, the muscle-targeting agent may comprise, or consist of, a nucleic acid (e.g., DNA or RNA), a peptide (e.g., an antibody), a lipid (e.g., a microvesicle), or a sugar moiety (e.g., a polysaccharide). Exemplary muscle-targeting agents are described in further detail herein, however, it should be appreciated that the exemplary muscle-targeting agents provided herein are not meant to be limiting.

[0102] Some aspects of the disclosure provide muscle-targeting agents that specifically bind to an antigen on muscle, such as skeletal muscle, smooth muscle, or cardiac muscle. In some embodiments, any of the muscle-targeting agents provided herein bind to (e.g., specifically bind to) an antigen on a skeletal muscle cell, a smooth muscle cell, and/or (e.g., and) a cardiac muscle cell.

[0103] By interacting with muscle-specific cell surface recognition elements (e.g., cell membrane proteins), both tissue localization and selective uptake into muscle cells can be achieved. In some embodiments, molecules that are substrates for muscle uptake transporters are useful for delivering a molecular payload into muscle tissue. Binding to muscle surface recognition elements followed by endocytosis can allow even large molecules such as antibodies to enter muscle cells. As another example molecular payloads conjugated to transferrin or anti-transferrin receptor antibodies can be taken up by muscle cells via binding to transferrin receptor, which may then be endocytosed, e.g., via clathrin-mediated endocytosis.

[0104] The use of muscle-targeting agents may be useful for concentrating a molecular payload (e.g., oligonucleotide) in muscle while reducing toxicity associated with effects in other tissues. In some embodiments, the muscle-targeting agent concentrates a bound molecular payload in muscle cells as compared to another cell type within a subject. In some embodiments, the muscle-targeting agent concentrates a bound molecular payload in muscle cells (e.g., skeletal, smooth, or cardiac muscle cells) in an amount that is at least 1, 2, 3, 4, 5, 6, 7, 8, 9, 10, 15, 20, 30, 40, 50, 60, 70, 80, 90, or 100 times greater than an amount in non-muscle cells (e.g., liver, neuronal, blood, or fat cells). In some embodiments, a toxicity of the molecular payload in a subject is reduced by at least 1%, 2%, 3%, 4%, 5%, 10%, 15%, 20%, 25%, 30%, 35%, 40%, 45%, 50%, 55%, 60%, 65%, 70%, 75%, 80%, 90%, or 95% when it is delivered to the subject when bound to the muscle-targeting agent.

[0105] In some embodiments, to achieve muscle selectivity, a muscle recognition element (e.g., a muscle cell antigen) may be required. As one example, a muscle-targeting agent may be a small molecule that is a substrate for a muscle-specific uptake transporter. As another example, a muscle-targeting agent may be an antibody that enters a muscle cell via transporter-mediated endocytosis. As another example, a muscle targeting agent may be a ligand that binds to cell surface receptor on a muscle cell. It should be appreciated that while transporter-based approaches provide a direct path for cellular entry, receptor-based targeting may involve stimulated endocytosis to reach the desired site of action.

[0106] i. Muscle-Targeting Antibodies

[0107] In some embodiments, the muscle-targeting agent is an antibody. Generally, the high specificity of antibodies for their target antigen provides the potential for selectively targeting muscle cells (e.g., skeletal, smooth, and/or (e.g., and) cardiac muscle cells). This specificity may also limit off-target toxicity. Examples of antibodies that are capable of targeting a surface antigen of muscle cells have been reported and are within the scope of the disclosure. For example, antibodies that target the surface of muscle cells are described in Arahata K., et al. “Immunostaining of skeletal and cardiac muscle surface membrane with antibody against Duchenne muscular dystrophy peptide” Nature 1988; 333: 861-3; Song K. S., et al. “Expression of caveolin-3 in skeletal, cardiac, and smooth muscle cells. Caveolin-3 is a component of the sarcolemma and co-fractionates with dystrophin and dystrophin-associated glycoproteins” J Biol Chem 1996; 271: 15160-5; and Weisbart R. H. et al., “Cell type specific targeted intracellular delivery into muscle of a monoclonal antibody that binds myosin IIb” Mol Immunol. 2003 March, 39(13):78309; the entire contents of each of which are incorporated herein by reference.

[0108] a. Anti-Transferrin Receptor Antibodies

[0109] Some aspects of the disclosure are based on the recognition that agents binding to transferrin receptor, e.g., anti-transferrin-receptor antibodies, are capable of targeting muscle cell. Transferrin receptors are internalizing cell surface receptors that transport transferrin across the cellular membrane and participate in the regulation and homeostasis of intracellular iron levels. Some aspects of the disclosure provide transferrin receptor binding proteins, which are capable of binding to transferrin receptor. Accordingly, aspects of the disclosure provide binding proteins (e.g., antibodies) that bind to transferrin receptor. In some embodiments, binding proteins that bind to transferrin receptor are internalized, along with any bound molecular payload, into a muscle cell. As used herein, an antibody that binds to a transferrin receptor may be referred to interchangeably as an, transferrin receptor antibody, an anti-transferrin receptor antibody, or an anti-TfR antibody. Antibodies that bind, e.g. specifically bind, to a transferrin receptor may be internalized into the cell, e.g. through receptor-mediated endocytosis, upon binding to a transferrin receptor.

[0110] It should be appreciated that anti-transferrin receptor antibodies may be produced, synthesized, and/or (e.g., and) derivatized using several known methodologies, e.g. library design using phage display. Exemplary methodologies have been characterized in the art and are incorporated by reference (Díez, P. et al. “High-throughput phage-display screening in array format”, Enzyme and microbial technology, 2015, 79, 34-41.; Christoph M. H. and Stanley, J. R. “Antibody Phage Display: Technique and Applications” J Invest Dermatol. 2014, 134:2.; Engleman, Edgar (Ed.) “Human Hybridomas and Monoclonal Antibodies.” 1985, Springer.). In other embodiments, an anti-transferrin receptor antibody has been previously characterized or disclosed. Antibodies that specifically bind to transferrin receptor are known in the art (see, e.g. U.S. Pat. No. 4,364,934, filed Dec. 4, 1979, “Monoclonal antibody to a human early thymocyte antigen and methods for preparing same”; U.S. Pat. No. 8,409,573, filed Jun. 14, 2006, “Anti-CD71 monoclonal antibodies and uses thereof for treating malignant tumor cells”; U.S. Pat. No. 9,708,406, filed May 20, 2014, “Anti-transferrin receptor antibodies and methods of use”; U.S. Pat. No. 9,611,323, filed Dec. 19, 2014, “Low affinity blood brain barrier receptor antibodies and uses therefor”; WO 2015/098989, filed Dec. 24, 2014, “Novel anti-Transferrin receptor antibody that passes through blood-brain barrier”; Schneider C. et al. “Structural features of the cell surface receptor for transferrin that is recognized by the monoclonal antibody OKT9.” J Biol Chem. 1982, 257:14, 8516-8522.; Lee et al. “Targeting Rat Anti-Mouse Transferrin Receptor Monoclonal Antibodies through Blood-Brain Barrier in Mouse” 2000, J Pharmacol. Exp. Ther., 292: 1048-1052.).

[0111] Provided herein, in some aspects, are new anti-TfR antibodies for use as the muscle targeting agents (e.g., in muscle targeting complexes). In some embodiments, the anti-TfR antibody described herein binds to transferrin receptor with high specificity and affinity. In some embodiments, the anti-TfR antibody described herein specifically binds to any extracellular epitope of a transferrin receptor or an epitope that becomes exposed to an antibody. In some embodiments, anti-TfR antibodies provided herein bind specifically to transferrin receptor from human, non-human primates, mouse, rat, etc. In some embodiments, anti-TfR antibodies provided herein bind to human transferrin receptor. In some embodiments, the anti-TfR antibody described herein binds to an amino acid segment of a human or non-human primate transferrin receptor, as provided in SEQ ID NOs: 242-245. In some embodiments, the anti-TfR antibody described herein binds to an amino acid segment corresponding to amino acids 90-96 of a human transferrin receptor as set forth in SEQ ID NO: 242, which is not in the apical domain of the transferrin receptor.

[0112] In some embodiments, an anti-TFR antibody specifically binds a TfR1 (e.g., a human or non-human primate TfR1) with binding affinity (e.g., as indicated by Kd) of at least about 10⁴ M, 10⁻⁵ M, 10⁻⁶ M, 10⁻⁷ M, 10⁻⁸ M, 10⁻⁹ M, 10⁻¹⁰ M, 10⁻¹¹ M, 10⁻¹² M, 10⁻¹³ M, or less. In some embodiments, the anti-TfR antibodies described herein binds to TfR1 with a KD of sub-nanomolar range. In some embodiments, the anti-TfR antibodies described herein selectively binds to transferrin receptor 1 (TfR1) but do not bind to transferrin receptor 2 (TfR2). In some embodiments, the anti-TfR antibodies described herein binds to human TfR1 and cyno TfR1 (e.g., with a Kd of 10⁻⁷ M, 10⁻⁸ M, 10⁻⁹ M, 10⁻¹⁰ M, 10⁻¹¹ M, 10⁻¹² M, 10⁻¹³ M, or less), but does not bind to a mouse TfR1. The affinity and binding kinetics of the anti-TfR antibody can be tested using any suitable method including but not limited to biosensor technology (e.g., OCTET or BIACORE). In some embodiments, binding of any one of the anti-TfR antibody described herein does not complete with or inhibit transferrin binding to the TfR1. In some embodiments, binding of any one of the anti-TfR antibody described herein does not complete with or inhibit HFE-beta-2-microglobulin binding to the TfR1.

[0113] An example human transferrin receptor amino acid sequence, corresponding to NCBI sequence NP_003225.2 (transferrin receptor protein 1 isoform 1, Homo sapiens) is as follows:

(SEQ ID NO: 242)
MMDQARSAFSNLFGGEPLSYTRFSLARQVDGDNSH
VEMKLAVDEEENADNNTKANVTKPKRCSGSICYGT
IAVIVFFLIGFMIGYLGYCKGVEPKTECERLAGTE
SPVREEPGEDFPAARRLYWDDLKRKLSEKLDSTDF
TGTIKLLNENSYVPREAGSQKDENLALYVENQFRE
FKLSKVWRDQHFVKIQVKDSAQNSVIIVDKNGRLV
YLVENPGGYVAYSKAATVTGKLVHANFGTKKDFED
LYTPVNGSIVIVRAGKITFAEKVANAESLNAIGVL
IYMDQTKFPIVNAELSFFGHAHLGTGDPYTPGFPS
FNHTQFPPSRSSGLPNIPVQTISRAAAEKLFGNME
GDCPSDWKTDSTCRMVTSESKNVKLTVSNVLKEIK
ILNIFGVIKGFVEPDHYVVVGAQRDAWGPGAAKSG
VGTALLLKLAQMFSDMVLKDGFQPSRSIIFASWSA
GDFGSVGATEWLEGYLSSLHLKAFTYINLDKAVLG
TSNFKVSASPLLYTLIEKTMQNVKHPVTGQFLYQD
SNWASKVEKLTLDNAAFPFLAYSGIPAVSFCFCED
TDYPYLGTTMDTYKELIERIPELNKVARAAAEVAG
QFVIKLTHDVELNLDYERYNSQLLSFVRDLNQYRA
DIKEMGLSLQWLYSARGDFFRATSRLTTDFGNAEK
TDRFVMKKLNDRVMRVEYHFLSPYVSPKESPFRHV
FWGSGSHTLPALLENLKLRKQNNGAFNETLFRNQL
ALATWTIQGAANALSGDVWDIDNEF.

[0114] An example non-human primate transferrin receptor amino acid sequence, corresponding to NCBI sequence NP_001244232.1 (transferrin receptor protein 1, Macaca mulatta) is as follows:

(SEQ ID NO: 243)
MMDQARSAFSNLFGGEPLSYTRFSLARQVDGDNSH
VEMKLGVDEEENTDNNTKPNGTKPKRCGGNICYGT
IAVIIFFLIGFMIGYLGYCKGVEPKTECERLAGTE
SPAREEPEEDFPAAPRLYWDDLKRKLSEKLDTTDF
TSTIKLLNENLYVPREAGSQKDENLALYIENQFRE
FKLSKVWRDQHFVKIQVKDSAQNSVIIVDKNGGLV
YLVENPGGYVAYSKAATVTGKLVHANFGTKKDFED
LDSPVNGSIVIVRAGKITFAEKVANAESLNAIGVL
IYMDQTKFPIVKADLSFFGHAHLGTGDPYTPGFPS
FNHTQFPPSQSSGLPNIPVQTISRAAAEKLFGNME
GDCPSDWKTDSTCKMVTSENKSVKLTVSNVLKETK
ILNIFGVIKGFVEPDHYVVVGAQRDAWGPGAAKSS
VGTALLLKLAQMFSDMVLKDGFQPSRSIIFASWSA
GDFGSVGATEWLEGYLSSLHLKAFTYINLDKAVLG
TSNFKVSASPLLYTLIEKTMQDVKHPVTGRSLYQD
SNWASKVEKLTLDNAAFPFLAYSGIPAVSFCFCED
TDYPYLGTTMDTYKELVERIPELNKVARAAAEVAG
QFVIKLTHDTELNLDYERYNSQLLLFLRDLNQYRA
DVKEMGLSLQWLYSARGDFFRATSRLTTDFRNAEK
RDKFVMKKLNDRVMRVEYYFLSPYVSPKESPFRHV
FWGSGSHTLSALLESLKLRRQNNSAFNETLFRNQL
ALATWTIQGAANALSGDVWDIDNEF

[0115] An example non-human primate transferrin receptor amino acid sequence, corresponding to NCBI sequence XP_005545315.1 (transferrin receptor protein 1, Macaca fascicularis) is as follows:

(SEQ ID NO: 244)
MMDQARSAFSNLFGGEPLSYTRFSLARQVDGDNSH
VEMKLGVDEEENTDNNTKANGTKPKRCGGNICYGT
IAVIIFFLIGFMIGYLGYCKGVEPKTECERLAGTE
SPAREEPEEDFPAAPRLYWDDLKRKLSEKLDTTDF
TSTIKLLNENLYVPREAGSQKDENLALYIENQFRE
FKLSKVWRDQHFVKIQVKDSAQNSVIIVDKNGGLV
YLVENPGGYVAYSKAATVTGKLVHANFGTKKDFED
LDSPVNGSIVIVRAGKITFAEKVANAESLNAIGVL
IYMDQTKFPIVKADLSFFGHAHLGTGDPYTPGFPS
FNHTQFPPSQSSGLPNIPVQTISRAAAEKLFGNME
GDCPSDWKTDSTCKMVTSENKSVKLTVSNVLKETK
ILNIFGVIKGFVEPDHYVVVGAQRDAWGPGAAKSS
VGTALLLKLAQMFSDMVLKDGFQPSRSIIFASWSA
GDFGSVGATEWLEGYLSSLHLKAFTYINLDKAVLG
TSNFKVSASPLLYTLIEKTMQDVKHPVTGRSLYQD
SNWASKVEKLTLDNAAFPFLAYSGIPAVSFCFCED
TDYPYLGTTMDTYKELVERIPELNKVARAAAEVAG
QFVIKLTHDTELNLDYERYNSQLLLFLRDLNQYRA
DVKEMGLSLQWLYSARGDFFRATSRLTTDFRNAEK
RDKFVMKKLNDRVMRVEYYFLSPYVSPKESPFRHV
FWGSGSHTLSALLESLKLRRQNNSAFNETLFRNQL
ALATWTIQGAANALSGDVWDIDNEF.

[0116] An example mouse transferrin receptor amino acid sequence, corresponding to NCBI sequence NP_001344227.1 (transferrin receptor protein 1, Mus musculus) is as follows:

(SEQ ID NO: 245)
MMDQARSAFSNLFGGEPLSYTRFSLARQVDGDNSH
VEMKLAADEEENADNNMKASVRKPKRFNGRLCFAA
IALVIFFLIGFMSGYLGYCKRVEQKEECVKLAETE
ETDKSETMETEDVPTSSRLYWADLKTLLSEKLNSI
EFADTIKQLSQNTYTPREAGSQKDESLAYYIENQF
HEFKFSKVWRDEHYVKIQVKSSIGQNMVTIVQSNG
NLDPVESPEGYVAFSKPTEVSGKLVHANFGTKKDF
EELSYSVNGSLVIVRAGEITFAEKVANAQSFNAIG
VLIYMDKNKFPVVEADLALFGHAHLGTGDPYTPGF
PSFNHTQFPPSQSSGLPNIPVQTISRAAAEKLFGK
MEGSCPARWNIDSSCKLELSQNQNVKLIVKNVLKE
RRILNIFGVIKGYEEPDRYVVVGAQRDALGAGVAA
KSSVGTGLLLKLAQVFSDMISKDGFRPSRSIIFAS
WTAGDFGAVGATEWLEGYLSSLHLKAFTYINLDKV
VLGTSNFKVSASPLLYTLMGKIMQDVKHPVDGKSL
YRDSNWISKVEKLSFDNAAYPFLAYSGIPAVSFCF
CEDADYPYLGTRLDTYEALTQKVPQLNQMVRTAAE
VAGQLIIKLTHDVELNLDYEMYNSKLLSFMKDLNQ
FKTDIRDMGLSLQWLYSARGDYFRATSRLTTDFHN
AEKTNRFVMREINDRIMKVEYHFLSPYVSPRESPF
RHIFWGSGSHTLSALVENLKLRQKNITAFNETLFR
NQLALATWTIQGVANALSGDIWNIDNEF

[0117] In some embodiments, an anti-transferrin receptor antibody binds to an amino acid segment of the receptor as follows:

(SEQ ID NO: 730)
FVKIQVKDSAQNSVIIVDKNGRLVYLVENPGGYVA
YSKAATVTGKLVHANFGTKKDFEDLYTPVNGSIVI
VRAGKITFAEKVANAESLNAIGVLIYMDQTKFPIV
NAELSFFGHAHLGTGDPYTPGFPSFNHTQFPPSRS
SGLPNIPVQTISRAAAEKLFGNMEGDCPSDWKTDS
TCRMVTSESKNVKLTVSNVLKE

and does not inhibit the binding interactions between transferrin receptors and transferrin and/or (e.g., and) human hemochromatosis protein (also known as HFE). In some embodiments, the anti-transferrin receptor antibody described herein does not bind an epitope in SEQ ID NO: 730.

[0118] Appropriate methodologies may be used to obtain and/or (e.g., and) produce antibodies, antibody fragments, or antigen-binding agents, e.g., through the use of recombinant DNA protocols. In some embodiments, an antibody may also be produced through the generation of hybridomas (see, e.g., Kohler, G and Milstein, C. “Continuous cultures of fused cells secreting antibody of predefined specificity” Nature, 1975, 256: 495-497). The antigen-of-interest may be used as the immunogen in any form or entity, e.g., recombinant or a naturally occurring form or entity. Hybridomas are screened using standard methods, e.g. ELISA screening, to find at least one hybridoma that produces an antibody that targets a particular antigen. Antibodies may also be produced through screening of protein expression libraries that express antibodies, e.g., phage display libraries. Phage display library design may also be used, in some embodiments, (see, e.g. U.S. Pat. No. 5,223,409, filed Mar. 1, 1991, “Directed evolution of novel binding proteins”; WO 1992/18619, filed Apr. 10, 1992, “Heterodimeric receptor libraries using phagemids”; WO 1991/17271, filed May 1, 1991, “Recombinant library screening methods”; WO 1992/20791, filed May 15, 1992, “Methods for producing members of specific binding pairs”; WO 1992/15679, filed Feb. 28, 1992, and “Improved epitope displaying phage”). In some embodiments, an antigen-of-interest may be used to immunize a non-human animal, e.g., a rodent or a goat. In some embodiments, an antibody is then obtained from the non-human animal, and may be optionally modified using a number of methodologies, e.g., using recombinant DNA techniques. Additional examples of antibody production and methodologies are known in the art (see, e.g. Harlow et al. “Antibodies: A Laboratory Manual”, Cold Spring Harbor Laboratory, 1988.).

[0119] In some embodiments, an antibody is modified, e.g., modified via glycosylation, phosphorylation, sumoylation, and/or (e.g., and) methylation. In some embodiments, an antibody is a glycosylated antibody, which is conjugated to one or more sugar or carbohydrate molecules. In some embodiments, the one or more sugar or carbohydrate molecule are conjugated to the antibody via N-glycosylation, O-glycosylation, C-glycosylation, glypiation (GPI anchor attachment), and/or (e.g., and) phosphoglycosylation. In some embodiments, the one or more sugar or carbohydrate molecules are monosaccharides, disaccharides, oligosaccharides, or glycans. In some embodiments, the one or more sugar or carbohydrate molecule is a branched oligosaccharide or a branched glycan. In some embodiments, the one or more sugar or carbohydrate molecule includes a mannose unit, a glucose unit, an N-acetylglucosamine unit, an N-acetylgalactosamine unit, a galactose unit, a fucose unit, or a phospholipid unit. In some embodiments, there are about 1-10, about 1-5, about 5-10, about 1-4, about 1-3, or about 2 sugar molecules. In some embodiments, a glycosylated antibody is fully or partially glycosylated. In some embodiments, an antibody is glycosylated by chemical reactions or by enzymatic means. In some embodiments, an antibody is glycosylated in vitro or inside a cell, which may optionally be deficient in an enzyme in the N- or O-glycosylation pathway, e.g. a glycosyltransferase. In some embodiments, an antibody is functionalized with sugar or carbohydrate molecules as described in International Patent Application Publication WO2014065661, published on May 1, 2014, entitled, “Modified antibody, antibody-conjugate and process for the preparation thereof”.

[0120] In some embodiments, the anti-TfR antibody of the present disclosure comprises a VL domain and/or (e.g., and) VH domain of any one of the anti-TfR antibodies selected from Table 2, and comprises a constant region comprising the amino acid sequences of the constant regions of an IgG, IgE, IgM, IgD, IgA or IgY immunoglobulin molecule, any class (e.g., IgG1, IgG2, IgG3, IgG4, IgA1 and IgA2), or any subclass (e.g., IgG2a and IgG2b) of immunoglobulin molecule. Non-limiting examples of human constant regions are described in the art, e.g., see Kabat E A et al., (1991) supra.

[0121] The heavy chain and light chain variable domain and CDR sequences of examples of anti-TfR antibodies are provided in Table 2.

TABLE 2
Examples of anti-TfR1 antibodies
(CDRs according to the IMGT® definition)

| Ab | CDRs | Variable domains |
|---|---|---|
| 3-A4 | CDR-H1: | VH |
| | GFNIKDDY | EVQLQQSGAELVRPGASVKLSCTASGFNIKDDYMYWVKQ |
| | (SEQ ID NO: 1) | RPEQGLEWIGWIDPENGDTEYASKFQDKATVTADTSSNTA |
| | CDR-H2: | YLQLSSLTSEDTAVYYCTLWLRRGLDYWGQGTSVTVSS |
| | IDPENGDT | (SEQ ID NO: 7) |
| | (SEQ ID NO: 2) | |
| | CDR-H3: | |
| | TLWLRRGLDY | |
| | (SEQ ID NO: 3) | |
| | CDR-L1: | VL |
| | KSLLHSNGYTY | DIVMTQAAPSVPVTPGESVSISCRSSKSLLHSNGYTYLFWF |
| | (SEQ ID NO: 4) | LQRPGQSPQLLIYRMSNLASGVPDRFSGSGSGTAFTLRISR |
| | CDR-L2: | VEAEDVGVYYCMQHLEYPFTFGGGTKLEIK |
| | RMS | (SEQ ID NO: 8) |
| | (SEQ ID NO: 5) | |
| | CDR-L3: | |
| | MQHLEYPFT | |
| | (SEQ ID NO: 6) | |
| 3-M12 | CDR-H1: | VH |
| | GYSITSGYY | DVQLQESGPGLVKPSQSLSLTCSVTGYSITSGYYWNWIRQ |
| | (SEQ ID NO: 9) | FPGNKLEWMGYITFDGANNYNPSLKNRISITRDTSKNQFFL |
| | CDR-H2: | KLTSVTTEDTATYYCTRSSYDYDVLDYWGQGTTLTVSS |
| | ITFDGAN | (SEQ ID NO: 15) |
| | (SEQ ID NO: 10) | |
| | CDR-H3: | |
| | TRSSYDYDVLDY | |
| | (SEQ ID NO: 11) | |
| | CDR-L1: | VL |
| | QDISNF | DIQMTQTTSSLSASLGDRVTISCRASQDISNFLNWYQQRPD |
| | (SEQ ID NO: 12) | GTVKLLIYYTSRLHSGVPSRFSGSGSGTDFSLTVSNLEQEDI |
| | CDR-L2: | ATYFCQQGHTLPYTFGGGTKLEIK |
| | YTS | (SEQ ID NO: 16) |
| | (SEQ ID NO: 13) | |
| | CDR-L3: | |
| | QQGHTLPYT | |
| | (SEQ ID NO: 14) | |
| 5-H12 | CDR-H1: | VH |
| | GYSFTDYC | QIQLQQSGPELVRPGASVKISCKASGYSFTDYCINWVNQR |
| | (SEQ ID NO: 17) | PGQGLEWIGWIYPGSGNTRYSERFKGKATLTVDTSSNTAY |
| | CDR-H2: | MQLSSLTSEDSAVYFCAREDYYPYHGMDYWGQGTSVTV |
| | IYPGSGNT | SS |
| | (SEQ ID NO: 18) | (SEQ ID NO: 23) |
| | CDR-H3: | |
| | AREDYYPYHGMDY | |
| | (SEQ ID NO: | |
| | 19) | |
| | CDR-L1: | VL |
| | ESVDGYDNSF | DIVLTQSPTSLAVSLGQRATISCRASESVDGYDNSFMHWY |
| | (SEQ ID NO: 20) | QQKPGQPPKLLIFRASNLESGIPARFSGSGSRTDFTLTINPV |
| | CDR-L2: | EAADVATYYCQQSSEDPWTFGGGTKLEIK |
| | RAS | (SEQ ID NO: 24) |
| | (SEQ ID NO: 21) | |
| | CDR-L3: | |
| | QQSSEDPWT | |
| | (SEQ ID NO: 22) | |
| 8-K6 | CDR-H1: | VH |
| | GYTFTSYW | QVHLQQPGAELVKPGASVKMSCKASGYTFTSYWITWVK |
| | (SEQ ID NO: 25) | QRPGQGLEWIGDIFPNSGRTNYDEKFKSKATLTVDTSSSTA |
| | CDR-H2: | YMQLSSLTSEDSAVYFCAREGNFGSLDYWGQGTTLTVSS |
| | IFPNSGRT | (SEQ ID NO: 31) |
| | (SEQ ID NO: 26) | |
| | CDR-H3: | |
| | AREGNFGSLDY | |
| | (SEQ ID NO: 27) | |
| | CDR-L1: | VL |
| | SNLNY | QIVLTQSPAIMSASPGEKVTMTCSANSNLNYMNWYHQKS |
| | (SEQ ID NO: 28) | GTSPKRWIYDTSKLASGVPARFSASGSGTSYSLTISSMEAE |
| | CDR-L2: | DAATYYCQQWSRNPLTFGAGTRLELK |
| | DTS | (SEQ ID NO: 32) |
| | (SEQ ID NO: 29) | |
| | CDR-L3: | |
| | QQWSRNPLT | |
| | (SEQ ID NO: 30) | |
| 9-K23 | CDR-H1: | VH |
| | GFSLNTYDVG | QVTLKESGPGMLQPSQTLSLTCSFSGFSLNTYDVGVGWIR |
| | (SEQ ID NO: 33) | QPSGKGLEWLANIWWNDDKYYNSALKSRLTISKDTSNNQ |
| | CDR-H2: | VFLKISSVDTADTATYYCTLYSYDGGFAYWGQGTLVTVS |
| | IWWNDDK | A |
| | (SEQ ID NO: 34) | (SEQ ID NO: 39) |
| | CDR-H3: | |
| | TLYSYDGGFAY | |
| | (SEQ ID NO: 35) | |
| | CDR-L1: | VL |
| | SSVSSSY | QIVLTQSPAIMSASLGERVTMTCTASSSVSSSYLHWYQQK |
| | (SEQ ID NO: 36) | PGSSPKLWIYSTSNLASGVPARFSGSGSGTSYSLTISSMEAE |
| | CDR-L2: | DAATYYCHQYHRSPYTFGGGTKLEIK |
| | STS | (SEQ ID NO: 40) |
| | (SEQ ID NO: 37) | |
| | CDR-L3: | |
| | HQYHRSPYT | |
| | (SEQ ID NO: 38) | |
| 3-E5 | CDR-H1: | VH |
| | GYSFTGYN | EIQMKQSGAELVKPGASVKISCKASGYSFTGYNMNWVKQ |
| | (SEQ ID NO: 41) | SHGKSLEWIGNINPYYGSTGYNQKFKGKATLTVDKSSSTA |
| | CDR-H2: | YMQLNSLTSEDSAVYYCARGDYGYDEGTWEAYWGQGTL |
| | INPYYGST | VTVSA |
| | (SEQ ID NO: 42) | (SEQ ID NO: 47) |
| | CDR-H3: | |
| | ARGDYGYDEGTWFAY | |
| | (SEQ ID NO: 43) | |
| | CDR-L1: | VL |
| | QSLLNSRTRKNY | DIVMSQSPSSLAVSAGEKVTMSCKSSQSLLNSRTRKNYLA |
| | (SEQ ID NO: 44) | WYQQKPEQSPKLLIYWASTRESGVPDRITGSGSGTDETLT |
| | CDR-L2: | ISSVQAEDLAVYYCKQSYNLPITFGSGTKLEIK |
| | WAS | (SEQ ID NO: 48) |
| | (SEQ ID NO: 45) | |
| | CDR-L3: | |
| | KQSYNLPFT | |
| | (SEQ ID NO: 46) | |
| 6-D3 | CDR-H1: | VH |
| | GYTFTRHW | QVQLQQPGAELVKPGASVKMSCKASGYTITRHWITWVK |
| | (SEQ ID NO: 49) | QRPGQGLEWIGDIYPGSGRTNYNEKEKSTATLTVDTSSST |
| | CDR-H2: | AYMQLSSLTSEDSAVYYCARDGYLYINYFDYWGQGTTLT |
| | IYPGSGRT | VSS |
| | (SEQ ID NO: 50) | (SEQ ID NO: 54) |
| | CDR-H3: | |
| | ARDGYLYINYFDY | |
| | (SEQ ID NO: | |
| | 51) | |
| | CDR-L1: | VL |
| | SSVSF | ENVLTQSPAIMSASPGEKVTMTCSASSSVSFMHWFQQKSS |
| | (SEQ ID NO: 52) | TSPKLWIYDTSKLASGVPGRFSGSGSGSSYSLTISSMAAED |
| | CDR-L2: | VATYYCFQGSGYPYTFGGGTKLEIK |
| | DTS | (SEQ ID NO: 55) |
| | (SEQ ID NO: 29) | |
| | CDR-L3: | |
| | FQGSGYPYT | |
| | (SEQ ID NO: 53) | |
| 4-O12 | CDR-H1: | VH |
| | GFNIVDDY | EVQLQQSGAELVRPGASVKLSCTASGFNIVDDYMHWVKQ |
| | (SEQ ID NO: 56) | RPEQGLEWIGWIYPENADTEYASKFQGKATITADTSSNTA |
| | CDR-H2: | YLQLSSLTSEDTAVYYCTTATGTGWFAYWGQGTLVTVSA |
| | IYPENADT | (SEQ ID NO: 62) |
| | (SEQ ID NO: 57) | |
| | CDR-H3: | |
| | TTATGTGWFAY | |
| | (SEQ ID NO: 58) | |
| | CDR-L1: | VL |
| | QSLLDSDGKTY | DVVMTQTPLTLSVTIGQPASISCKSSQSLLDSDGKTYLNWL |
| | (SEQ ID NO: 59) | FQRPGQSPKRLIYLVSKLDSGVPDRFTGSGSGTDFTLKISR |
| | CDR-L2: | VETEDLGVYYCWQGTHFPWTFGGGAKLEIK |
| | LVS | (SEQ ID NO: 63) |
| | (SEQ ID NO: 60) | |
| | CDR-L3: | |
| | WQGTHFPWT | |
| | (SEQ ID NO: 61) | |
| 4-C5 | CDR-H1: | VH |
| | GYTFSNYW | QVQLQQSGAELMKPGASVKISCKATGYTFSNYWIEWVKQ |
| | (SEQ ID NO: 64) | RPGHGLEWIGEILPGSGSTNYNENFKGKATFTADTSSNTA |
| | CDR-H2: | YMQLSSLTSEDSAVYYCARRGAYGNFHYWGQGTTLTVSS |
| | ILPGSGST | (SEQ ID NO: 70) |
| | (SEQ ID NO: 65) | |
| | CDR-H3: | |
| | ARRGAYGNFHY | |
| | (SEQ ID NO: 66) | |
| | CDR-L1: | VL |
| | SSISSSN | EIVLTQSPALMAASPGEKVTITCSVSSSISSSNLHWYQQKS |
| | (SEQ ID NO: 67) | ETSPKPWIYGTSNLASGVPVRFSGSGSGTSYSLTISSMEAE |
| | CDR-L2: | DAATYYCQQWRSYPYTFGGGTKLEIK |
| | GTS | (SEQ ID NO: 71) |
| | (SEQ ID NO: 68) | |
| | CDR-L3: | |
| | QQWRSYPYT | |
| | (SEQ ID NO: 69) | |
| 10-P5 | CDR-H1: | VH |
| | GYTFTDYN | EVQLQQFGAELVKPGASVKISCKASGYTFTDYNMAWVKE |
| | (SEQ ID NO: 72) | SHGKSLEWIGDINPNYDTTSYNQKFKGKATLTVDKSSSTA |
| | CDR-H2: | HMELRSLTSEGTAVYYCARSGYYGSSYYWHFDVWGTGT |
| | INPNYDTT | TVTVSS |
| | (SEQ ID NO: 73) | (SEQ ID NO: 77) |
| | CDR-H3: | |
| | ARSGYYGSSYYWHFDV | |
| | (SEQ ID NO: 74) | |
| | CDR-L1: | VL |
| | QSLLYSSNQKNY | DIVMSQSPSSLAVSVGEKVTMSCKSSQSLLYSSNQKNYLA |
| | (SEQ ID NO: 75) | WYQQKPGQSPKLLIYWASTRESGVPDRFTGSGSGTDFTLT |
| | CDR-L2: | ISSVKAEDLAVYYCQQYYNYPFTFGSGTKLEIK(SEQID |
| | WAS | NO: 78) |
| | (SEQ ID NO: 45) | |
| | CDR-L3: | |
| | QQYYNYPFT | |
| | (SEQ ID NO: 76) | |
| 2-H19 | CDR-H1: | VH |
| | GFNIKDYY | EVQLQQSGAELVRSGASVKLSCTASGFNIKDYYMHWVKQ |
| | (SEQ ID NO: 79) | RPEQGLEWIGWIDPESGDTEYAPKFQGRATMTADTSSNTA |
| | CDR-H2: | YMQLSSLTSEDTAVYYCYGHDYRVDCWGQGTSVTVSS |
| | IDPESGDT | (SEQ ID NO: 85) |
| | (SEQ ID NO: 80) | |
| | CDR-H3: | |
| | YGHDYRVDC | |
| | (SEQ ID NO: 81) | |
| | CDR-L1: | VL |
| | QSLVHSNGNTY | DVVMTQTPLSLPVSLGDQASISCRSSQSLVHSNGNTYLHW |
| | (SEQ ID NO: 82) | YLQKPGQSPKLLIYKVSNRFSGVPDRFSGSGSGTDFTLKIS |
| | CDR-L2: | RVEAEDLGVYFCSQSTHIPWTFGGGTKLEIK (SEQ ID NO: |
| | KVS | 86) |
| | (SEQ ID NO: 83) | |
| | CDR-L3: | |
| | SQSTHIPWT | |
| | (SEQ ID NO: 84) | |
| 3-F3 | CDR-H1: | VH |
| | GYTFTDYN | EVQLQQFGAELVKPGASVKISCKASGYTFTDYNMGWVKQ |
| | (SEQ ID NO: 72) | SHGKSLEWIGDINPNYDSTSYTQKFKGKATLTVDKSSSTA |
| | CDR-H2: | YMELRSLTSEDTAVYYCARSGYYGSSYYWHFDVWGTGT |
| | INPNYDST | TVTVSS (SEQ ID NO: 89) |
| | (SEQ ID NO: 87) | |
| | CDR-H3: | |
| | ARSGYYGSSYYWHEDV | |
| | (SEQ ID | |
| | NO: 74) | |
| | CDR-L1: | VL |
| | QSLLYSSNQKNY | DIVMSQSPSSLAVSVGEKVTMSCKSSQSLLYSSNQKNYLA |
| | (SEQ ID NO: 75) | WYQQKPGQSPKLLIYWASTRESGVPDRFTGSGSGTDFTLT |
| | CDR-L2: | ISSVKAEDLAVYYCQQYYHYPFTFGSGTKLEIK (SEQ ID |
| | WAS | NO: 90) |
| | (SEQ ID NO: 45) | |
| | CDR-L3: | |
| | QQYYHYPFT | |
| | (SEQ ID NO: 88) | |
| 8-O17 | CDR-H1: | VH |
| | GFSLTNYG | QVQLKESGPGLV APSQSLSITCTVSGFSLTNYGVHWVRQP |
| | (SEQ ID NO: 91) | PGKGLEWLVVIWNDGSATYNSALESRLSISKDNSKSQVFL |
| | CDR-H2: | KMNSLQTDDTAMYYCARHESSNPFAYWGQGTLVTVSA |
| | IWNDGSA | (SEQ ID NO: 97) |
| | (SEQ ID NO: 92) | |
| | CDR-H3: | |
| | ARHESSNPFAY | |
| | (SEQ ID NO: 93) | |
| | CDR-L1: | VL |
| | QSIGTS | DILLTQSPAILSVSPGERVSFSCRASQSIGTSIHWYQQRTNG |
| | (SEQ ID NO: 94) | SPRLLIKSASESIAGIPSRFSGSGSGTDFTLSINSVESEDIADY |
| | CDR-L2: | YCQQNNRWPYTFGGGTKLEIK (SEQ ID NO: 98) |
| | SAS | |
| | (SEQ ID NO: 95) | |
| | CDR-L3: | |
| | QQNNRWPYT | |
| | (SEQ ID NO: 96) | |
| 3-M9 | CDR-H1: | VH |
| | DFNIKDDY | EVQLQQSGAELVRPGASVKLSCTASDFNIKDDYIHWVKQ |
| | (SEQ ID NO: 99) | RPEQGLEWIGR1DPANGNTKYAPKFQDKATITADTSSNTA |
| | CDR-H2: | YLQLSSLTSEDTAVYYCALGYTYWGQGTTLTVSS |
| | IDPANGNT | (SEQ ID NO: 104) |
| | (SEQ ID NO: 100) | |
| | CDR-H3: | |
| | ALGYTY | |
| | (SEQ ID NO: 101) | |
| | CDR-L1: | VL |
| | QSLLHSYGKTY | DVVMTQTPLTLSVTIGQPASISCKSSQSLLHSYGKTYLNWL |
| | (SEQ ID NO: 102) | LQRPGQSPKLLIYLVSKLESGVPDRFSGSGSGTDFTLKISRV |
| | CDR-L2: | EAEDLGVYYCLQTTHFPQTFGGGTKLEIK (SEQ ID NO: |
| | LVS | 105) |
| | (SEQ ID NO: 60) | |
| | CDR-L3: | |
| | LQTTHFPQT | |
| | (SEQ ID NO: 103) | |
| 10-H2 | CDR-H1: | VH |
| | GFTFSDYG | EVQLVESGGDLVKPGGSLKLSCAASGFTFSDYGMHWVRQ |
| | (SEQ ID NO: 106) | GPEKGLEWVAYINSGSSTIYYADTVKGRFTISRDNAKNTL |
| | CDR-H2: | FLQMTSLRSEDTAMYYCARPGDYDNYAMDYWGQGTSVT |
| | INSGSSTI | VSS (SEQ ID NO: 112) |
| | (SEQ ID NO: 107) | |
| | CDR-H3: | |
| | ARPGDYDNYAMDY | |
| | (SEQ ID NO: 108) | |
| | CDR-L1: | VL |
| | QDVSVA | D1VMTQSHKFLSTSVGDRVSITCKASQDVSVAVAWYQQK |
| | (SEQ ID NO: 109) | PGQSPKLLIYWAYTRHTGVPDRFTGSGSGTEYTLTISSVQA |
| | CDR-L2: | EDLALYYCQQHYNTPPWTFGGGTKLEIK |
| | WAY | (SEQ ID NO: 113) |
| | (SEQ ID NO: 110) | |
| | CDR-L3: | |
| | QQHYNTPPWT | |
| | (SEQ ID NO: 111) | |
| 4-J22 | CDR-H1: | VH |
| | GFNIKDYY | EVQLQQSGAELVRSGASVKLSCTASGFNIKDYYIHWVKQ |
| | (SEQ ID NO: 79) | RPEQGLEWIGWIDPENADTEYAPKFQGKATMTPDTSSNTA |
| | CDR-H2: | YLQLSSLTSEDTAVYYCYAWDYSMDYWGQGTSVTVSS |
| | IDPENADT | (SEQ ID NO: 117) |
| | (SEQ ID NO: 114) | |
| | CDR-H3: | |
| | YAWDYSMDY | |
| | (SEQ ID NO: 115) | |
| | CDR-L1: | VL |
| | QSLVHSNGNTY | DVVMTQTPLSLSVSLGDQASISCRSSQSLVHSNGNTYLHW |
| | (SEQ ID NO: 82) | YLQKPGQSPKLL1YKVSNRFSGVPDRFSGSGSGTDFILKISR |
| | CDR-L2: | VEAEDLGVYFCSQNTHVPYTFGGGTRLEIK (SEQ ID NO: |
| | KVS | 118) |
| | (SEQ ID NO: 83) | |
| | CDR-L3: | |
| | SQNTHVPYT | |
| | (SEQ ID NO: 116) | |
| 9-D4 | CDR-H1: | VH |
| | GFTPTDYG | QVQLQQSGTELARPGASVKLSCKASGFTFTDYGINWVKQ |
| | (SEQ ID NO: 119) | RTGQGLEWIGEIYPSSGNSYYNEKFKAKATLTADKSSSTA |
| | CDR-H2: | YMELRSLTSEDSAVYFCARSTYYGSPIDYWGQGTTLTVSS |
| | IYPSSGNS | (SEQ ID NO: 124) |
| | (SEQ ID NO: 120) | |
| | CDR-H3: | |
| | ARSTYYGSPIDY | |
| | (SEQ ID NO: 121) | |
| | CDR-L1: | VL |
| | QDVDTT | DIVMTQSHKFMSTPVGDRVSITCKASQDVDTTVAWYQQK |
| | (SEQ ID NO: 122) | PGQSPKLUYWASTRQIGVPDRFTGSGSGTDFTLTISNVQSE |
| | CDR-L2: | DLADYFCQQYSTYPLTFGGGTKLEIK |
| | WAS | (SEQ ID NO: 125) |
| | (SEQ ID NO: 45) | |
| | CDR L3: | |
| | QQYSTYPLT | |
| | (SEQ ID NO: 123) | |
| 8-D15 | CDR-H1: | VH |
| | GFSLTSYA | QVQLKESGPGLVAPSQSLSITCTVSGFSLTSYAITWVRQSP |
| | (SEQ ID NO: 126) | GKGLEWLGLIWTGGGTNYNSALKSRLSISKDNSKSQVFLK |
| | CDR-H2: | MNSLQTDDTARYYCARIYDGYYRYFDVWGTGTTVTVSS |
| | IWTGGGT | (SEQ ID NO: 132) |
| | (SEQ ID NO: 127) | |
| | CDR-H3: | |
| | ARIYDGYYRYFDV | |
| | (SEQ ID NO: | |
| | 128) | |
| | CDR-L1: | VL |
| | QSVSND | RIVLTQTPKFLLVSAGDRVTMTCKASQSVSNDVAWYQQK |
| | (SEQ ID NO: 129) | PGQSPKLLIYYASNRYTGVPDRFTGSGYGTDFTFTISTVQA |
| | CDR-L2: | EDLAVYFCQQDYSSPWTFGGGTKLEIK |
| | YAS | (SEQ ID NO: 133) |
| | (SEQ ID NO: 130) | |
| | CDR-L3: | |
| | QQDYSSPWT | |
| | (SEQ ID NO: 131) | |
| 4-H4 | CDR-H1: | VH |
| | GFNIKDYY | EVQLQQSGAELVRSGASVKLSCTASGFNIKDYYMHWVKQ |
| | (SEQ ID NO: 79) | RPEQGLDWIGWIDPENGDTEYAPKFQGKATMTADTSSNT |
| | CDR-H2: | AYLQLSSLTSEDTAVYYCNVLTMPTAYWGQGTLVTVSA |
| | IDPENGDT | (SEQ ID NO: 136) |
| | (SEQ ID NO: 2) | |
| | CDR-H3: | |
| | NVLTMPTAY | |
| | (SEQ ID NO: 134) | |
| | CDR-L1: | VL |
| | QSLLYSSNQKNY | DIVMSQSPSSLAVSVGEKVIMSCKSSQSLLYSSNQKNYLA |
| | (SEQ ID NO: 75) | WYQQKPGQSPKLLIYWASTRESGVPDRFTGSGSGTDFTLT |
| | CDR-L2: | ISSVKAEDLAVYYCQQYYSYPYTFGCiCiTKLEIK |
| | WAS | (SEQ ID NO: 137) |
| | (SEQ ID NO: 45) | |
| | CDR-L3: | |
| | QQYYSYPYT | |
| | (SEQ ID NO: 135) | |
| 9-C4 | CDR-H1: | VH |
| | GFTFSSYG | EVQLMESGGDLVKPGGSLKLSCAASGFTFSSYGLSWVRQ |
| | (SEQ ID NO: 138) | TPDKRLEWVATITSGGSYTYYPDSVKGRITISRDNARNTL |
| | CDR-H2: | YLQMFSLKSEDTAMYYCALWSLDYWGQGTTLTVSS |
| | ITSGGSYT | (SEQ ID NO: 143) |
| | (SEQ ID NO: 139) | |
| | CDR-H3: | |
| | ALWSLDY | |
| | (SEQ ID NO: 140) | |
| | CDR-L1: | VL |
| | SSLSY | QIVLTQSPALMSASPGEKVTMTCSANSSLSYMHWYQQKPG |
| | (SEQ ID NO: 141) | TSPKRWIYDTSELASGVPARESGSGSGTSYSLTISSMEAED |
| | CDR-L2: | AATYYCHQRRSYPWTFGGGTKLEIK (SEQ ID NO: 144) |
| | DTS (SEQ ID NO: 29) | |
| | CDR-L3: | |
| | HQRRSYPWT | |
| | (SEQ ID NO: 142) | |

[0122] In some embodiments, the anti-TfR antibodies of the present disclosure comprises one or more of the CDR-H (e.g., CDR-H1, CDR-H2, and CDR-H3) amino acid sequences from any one of the anti-TfR antibodies selected from Table 2. In some embodiments, the anti-TfR antibodies of the present disclosure comprise the CDR-H1, CDR-H2, and CDR-H3 as provided for any one of the antibodies selected from Table 2. In some embodiments, the anti-TfR antibodies of the present disclosure comprises one or more of the CDR-L (e.g., CDR-L1, CDR-L2, and CDR-L3) amino acid sequences from any one of the anti-TfR antibodies selected from Table 2. In some embodiments, the anti-TfR antibodies of the present disclosure comprise the CDR-L1, CDR-L2, and CDR-L3 as provided for any one of the anti-TfR antibodies selected from Table 2.

[0123] In some embodiments, the anti-TfR antibodies of the present disclosure comprises the CDR-H1, CDR-H2, CDR-H3, CDR-L1, CDR-L2, and CDR-L3 as provided for any one of the anti-TfR antibodies selected from Table 2. In some embodiments, antibody heavy and light chain CDR3 domains may play a particularly important role in the binding specificity/affinity of an antibody for an antigen. Accordingly, the anti-TfR antibodies of the disclosure may include at least the heavy and/or (e.g., and) light chain CDR3s of any one of the anti-TfR antibodies selected from Table 2.

[0124] In some examples, any of the anti-TfR antibodies of the disclosure have one or more CDR (e.g., CDR-H or CDR-L) sequences substantially similar to any of the CDR-H1, CDR-H2, CDR-H3, CDR-L1, CDR-L2, and/or (e.g., and) CDR-L3 sequences from one of the anti-TfR antibodies selected from Table 2. In some embodiments, the position of one or more CDRs along the VH (e.g., CDR-H1, CDR-H2, or CDR-H3) and/or (e.g., and) VL (e.g., CDR-L1, CDR-L2, or CDR-L3) region of an antibody described herein can vary by one, two, three, four, five, or six amino acid positions so long as immunospecific binding to transferrin receptor (e.g., human transferrin receptor) is maintained (e.g., substantially maintained, for example, at least 50%, at least 60%, at least 70%, at least 80%, at least 90%, at least 95% of the binding of the original antibody from which it is derived). For example, in some embodiments, the position defining a CDR of any antibody described herein can vary by shifting the N-terminal and/or (e.g., and) C-terminal boundary of the CDR by one, two, three, four, five, or six amino acids, relative to the CDR position of any one of the antibodies described herein, so long as immunospecific binding to transferrin receptor (e.g., human transferrin receptor) is maintained (e.g., substantially maintained, for example, at least 50%, at least 60%, at least 70%, at least 80%, at least 90%, at least 95% of the binding of the original antibody from which it is derived). In another embodiment, the length of one or more CDRs along the VH (e.g., CDR-H1, CDR-H2, or CDR-H3) and/or (e.g., and) VL (e.g., CDR-L1, CDR-L2, or CDR-L3) region of an antibody described herein can vary (e.g., be shorter or longer) by one, two, three, four, five, or more amino acids, so long as immunospecific binding to transferrin receptor (e.g., human transferrin receptor) is maintained (e.g., substantially maintained, for example, at least 50%, at least 60%, at least 70%, at least 80%, at least 90%, at least 95% of the binding of the original antibody from which it is derived).

[0125] Accordingly, in some embodiments, a CDR-L1, CDR-L2, CDR-L3, CDR-H1, CDR-H2, and/or (e.g., and) CDR-H3 described herein may be one, two, three, four, five or more amino acids shorter than one or more of the CDRs described herein (e.g., CDRS from any of the anti-TfR antibodies selected from Table 2) so long as immunospecific binding to transferrin receptor (e.g., human transferrin receptor) is maintained (e.g., substantially maintained, for example, at least 50%, at least 60%, at least 70%, at least 80%, at least 90%, at least 95% relative to the binding of the original antibody from which it is derived). In some embodiments, a CDR-L1, CDR-L2, CDR-L3, CDR-H1, CDR-H2, and/or (e.g., and) CDR-H3 described herein may be one, two, three, four, five or more amino acids longer than one or more of the CDRs described herein (e.g., CDRS from any of the anti-TfR antibodies selected from Table 2) so long as immunospecific binding to transferrin receptor (e.g., human transferrin receptor) is maintained (e.g., substantially maintained, for example, at least 50%, at least 60%, at least 70%, at least 80%, at least 90%, at least 95% relative to the binding of the original antibody from which it is derived). In some embodiments, the amino portion of a CDR-L1, CDR-L2, CDR-L3, CDR-H1, CDR-H2, and/or (e.g., and) CDR-H3 described herein can be extended by one, two, three, four, five or more amino acids compared to one or more of the CDRs described herein (e.g., CDRS from any of the anti-TfR antibodies selected from Table 2) so long as immunospecific binding to transferrin receptor (e.g., human transferrin receptor is maintained (e.g., substantially maintained, for example, at least 50%, at least 60%, at least 70%, at least 80%, at least 90%, at least 95% relative to the binding of the original antibody from which it is derived). In some embodiments, the carboxy portion of a CDR-L1, CDR-L2, CDR-L3, CDR-H1, CDR-H2, and/or (e.g., and) CDR-H3 described herein can be extended by one, two, three, four, five or more amino acids compared to one or more of the CDRs described herein (e.g., CDRS from any of the anti-TfR antibodies selected from Table 2) so long as immunospecific binding to transferrin receptor (e.g., human transferrin receptor) is maintained (e.g., substantially maintained, for example, at least 50%, at least 60%, at least 70%, at least 80%, at least 90%, at least 95% relative to the binding of the original antibody from which it is derived). In some embodiments, the amino portion of a CDR-L1, CDR-L2, CDR-L3, CDR-H1, CDR-H2, and/or (e.g., and) CDR-H3 described herein can be shortened by one, two, three, four, five or more amino acids compared to one or more of the CDRs described herein (e.g., CDRS from any of the anti-TfR antibodies selected from Table 2) so long as immunospecific binding to transferrin receptor (e.g., human transferrin receptor) is maintained (e.g., substantially maintained, for example, at least 50%, at least 60%, at least 70%, at least 80%, at least 90%, at least 95% relative to the binding of the original antibody from which it is derived). In some embodiments, the carboxy portion of a CDR-L1, CDR-L2, CDR-L3, CDR-H1, CDR-H2, and/or (e.g., and) CDR-H3 described herein can be shortened by one, two, three, four, five or more amino acids compared to one or more of the CDRs described herein (e.g., CDRS from any of the anti-TfR antibodies selected from Table 2) so long as immunospecific binding to transferrin receptor (e.g., human transferrin receptor) is maintained (e.g., substantially maintained, for example, at least 50%, at least 60%, at least 70%, at least 80%, at least 90%, at least 95% relative to the binding of the original antibody from which it is derived). Any method can be used to ascertain whether immunospecific binding to transferrin receptor (e.g., human transferrin receptor) is maintained, for example, using binding assays and conditions described in the art.

[0126] In some examples, any of the anti-TfR antibodies of the disclosure have one or more CDR (e.g., CDR-H or CDR-L) sequences substantially similar to any one of the anti-TfR antibodies selected from Table 2. For example, the antibodies may include one or more CDR sequence(s) from any of the anti-TfR antibodies selected from Table 2 containing up to 5, 4, 3, 2, or 1 amino acid residue variations as compared to the corresponding CDR region in any one of the CDRs provided herein (e.g., CDRs from any of the anti-TfR antibodies selected from Table 2) so long as immunospecific binding to transferrin receptor (e.g., human transferrin receptor) is maintained (e.g., substantially maintained, for example, at least 50%, at least 60%, at least 70%, at least 80%, at least 90%, at least 95% relative to the binding of the original antibody from which it is derived). In some embodiments, any of the amino acid variations in any of the CDRs provided herein may be conservative variations. Conservative variations can be introduced into the CDRs at positions where the residues are not likely to be involved in interacting with a transferrin receptor protein (e.g., a human transferrin receptor protein), for example, as determined based on a crystal structure. Some aspects of the disclosure provide anti-TfR antibodies that comprise one or more of the heavy chain variable (VH) and/or (e.g., and) light chain variable (VL) domains provided herein. In some embodiments, any of the VH domains provided herein include one or more of the CDR-H sequences (e.g., CDR-H1, CDR-H2, and CDR-H3) provided herein, for example, any of the CDR-H sequences provided in any one of the anti-TfR selected from Table 2. In some embodiments, any of the VL domains provided herein include one or more of the CDR-L sequences (e.g., CDR-L1, CDR-L2, and CDR-L3) provided herein, for example, any of the CDR-L sequences provided in any one of the anti-TfR antibodies selected from Table 2.

[0127] In some embodiments, the anti-TfR antibodies of the disclosure include any antibody that includes a heavy chain variable domain and/or (e.g., and) a light chain variable domain of any one of the anti-TfR antibodies selected from Table 2, and variants thereof. In some embodiments, anti-TfR antibodies of the disclosure include any antibody that includes the heavy chain variable and light chain variable pairs of any anti-TfR antibodies selected from Table 2.

[0128] Aspects of the disclosure provide anti-TfR antibodies having a heavy chain variable (VH) and/or (e.g., and) a light chain variable (VL) domain amino acid sequence homologous to any of those described herein. In some embodiments, the anti-TfR antibody comprises a heavy chain variable sequence or a light chain variable sequence that is at least 75% (e.g., 80%, 85%, 90%, 95%, 98%, or 99%) identical to the heavy chain variable sequence and/or any light chain variable sequence of any one of the anti-TfR antibodies selected from Table 2. In some embodiments, the homologous heavy chain variable and/or (e.g., and) a light chain variable amino acid sequences do not vary within any of the CDR sequences provided herein. For example, in some embodiments, the degree of sequence variation (e.g., 75%, 80%, 85%, 90%, 95%, 98%, or 99%) may occur within a heavy chain variable and/or (e.g., and) a light chain variable sequence excluding any of the CDR sequences provided herein. In some embodiments, any of the anti-TfR antibodies provided herein comprise a heavy chain variable sequence and a light chain variable sequence that comprises a framework sequence that is at least 75%, 80%, 85%, 90%, 95%, 98%, or 99% identical to the framework sequence of any anti-TfR antibodies selected from Table 2.

[0129] In some embodiments, the anti-TfR antibody of the present disclosure comprises a CDR-H1, a CDR-H2, and a CDR-H3 of a heavy chain variable domain having the amino acid sequence of SEQ ID NO: 7. Alternatively or in addition (e.g., in addition), the anti-TfR antibody of the present disclosure comprises a CDR-L1, a CDR-L2, and a CDR-L3 of a light chain variable domain having the amino acid sequence of SEQ ID NO: 8.

[0130] In some embodiments, the anti-TfR antibody of the present disclosure comprises a CDR-H1 having the amino acid sequence of SEQ ID NO: 1 (according to the IMGT definition system), a CDR-H2 having the amino acid sequence of SEQ ID NO: 2 (according to the IMGT definition system), a CDR-H3 having the amino acid sequence of SEQ ID NO: 3 (according to the IMGT definition system), a CDR-L1 having the amino acid sequence of SEQ ID NO: 4 (according to the IMGT definition system), a CDR-L2 having the amino acid sequence of SEQ ID NO: 5 (according to the IMGT definition system), and a CDR-L3 having the amino acid sequence of SEQ ID NO: 6 (according to the IMGT definition system).

[0131] In some embodiments, the anti-TfR antibody of the present disclosure comprises: a CDR-H1 having the amino acid sequence of SEQ ID NO: 1; a CDR-H2 having the amino acid sequence of SEQ ID NO: 2 with an amino acid substitution at position 5 (e.g., the asparagine at position 5 is substituted, e.g., with any one of Arg (R), Lys (K), Asp (D), Glu (E), Gln (Q), His (H), Ser (S), Thr (T), Tyr (Y), Cys (C), Trp (W), Met (M), Ala (A), Ile (I), Leu (L), Phe (F), Val (V), Pro (P), Gly (G)); and a CDR-H3 having the amino acid sequence of SEQ ID NO: 3. Alternatively or in addition (e.g., in addition), the anti-TfR antibody of the present disclosure comprises: a CDR-L1 having the amino acid sequence of SEQ ID NO: 4; a CDR-L2 having the amino acid sequence of SEQ ID NO: 5; and a CDR-L3 having the amino acid sequence of SEQ ID NO: 6. In some embodiments, the amino acid substitution at position 5 of the CDR-H2 as set forth in SEQ ID NO: 2 is N5T or N5S.

[0132] In some embodiments, the anti-TfR antibody of the present disclosure comprises: a CDR-H1 having the amino acid sequence of SEQ ID NO: 1; a CDR-H2 having the amino acid sequence of SEQ ID NO: 731 or SEQ ID NO: 80; and a CDR-H3 having the amino acid sequence of SEQ ID NO: 3. Alternatively or in addition (e.g., in addition), the anti-TfR antibody of the present disclosure comprises: a CDR-L1 having the amino acid sequence of SEQ ID NO: 4; a CDR-L2 having the amino acid sequence of SEQ ID NO: 5; and a CDR-L3 having the amino acid sequence of SEQ ID NO: 6.

[0133] In some embodiments, anti-TfR antibody of the present disclosure comprises a CDR-H1, a CDR-H2, and a CDR-H3, which collectively contains no more than 5 amino acid H1 having the amino acid sequence of SEQ ID NO: 1, CDR-H2 having the amino acid sequence of SEQ ID NO: 2, SEQ ID NO: 731 or SEQ ID NO: 80, and CDR-H3 having the amino acid sequence of SEQ ID NO: 3. “Collectively,” as used anywhere in the present disclosure, means that the total number of amino acid variations in all of the three heavy chain CDRs is within the defined range. Alternatively or in addition (e.g., in addition), the anti-TfR antibody of the present disclosure comprises a CDR-L1, a CDR-L2, and a CDR-L3, which collectively contains no more than 5 amino acid variations (e.g., no more than 5, 4, 3, 2 or 1 amino acid variation) as compared with the CDR-L1 having the amino acid sequence of SEQ ID NO: 4, CDR-L2 having the amino acid sequence of SEQ ID NO: 5, and CDR-L3 having the amino acid sequence of SEQ ID NO: 6.

[0134] In some embodiments, the anti-TfR antibody of the present disclosure comprises a CDR-H1, a CDR-H2, and a CDR-H3 that collectively are at least 75% (e.g., 75%, 80%, 85%, 90%, 95%, 98%, or 99%) identical to the CDR-H1 having the amino acid sequence of SEQ ID NO: 1, CDR-H2 having the amino acid sequence of SEQ ID NO: 2, SEQ ID NO: 731 or SEQ ID NO: 80, and CDR-H3 having the amino acid sequence of SEQ ID NO: 3. Alternatively or in addition (e.g., in addition), the anti-TfR antibody of the present disclosure comprises a CDR-L1, a CDR-L2, and a CDR-L3 that collectively are at least 75% (e.g., 75%, 80%, 85%, 90%, 95%, 98%, or 99%) identical to the to the CDR-L1 having the amino acid sequence of SEQ ID NO: 4, CDR-L2 having the amino acid sequence of SEQ ID NO: 5, and CDR-L3 having the amino acid sequence of SEQ ID NO: 6.

[0135] In some embodiments, the anti-TfR antibody of the present disclosure comprises: a CDR-H1 having no more than 3 amino acid variations (e.g., no more than 3, 2, or 1 amino acid variation) as compared with the CDR-H1 having the amino acid sequence of SEQ ID NO: 1; a CDR-H2 having no more than 3 amino acid variations (e.g., no more than 3, 2, or 1 amino acid variation) as compared with the CDR-H2 having the amino acid sequence of SEQ ID NO: 2, SEQ ID NO: 731 or SEQ ID NO: 80; and/or (e.g., and) a CDR-H3 having no more than 3 amino acid variations (e.g., no more than 3, 2, or 1 amino acid variation) as compared with the CDR-H3 having the amino acid sequence of SEQ ID NO: 3. Alternatively or in addition (e.g., in addition), the anti-TfR antibody of the present disclosure comprises: a CDR-L1 having no more than 3 amino acid variations (e.g., no more than 3, 2, or 1 amino acid variation) as compared with the CDR-L1 having the amino acid sequence of SEQ ID NO: 4; a CDR-L2 having no more than 3 amino acid variations (e.g., no more than 3, 2, or 1 amino acid variation) as compared with the CDR-L2 having the amino acid sequence of SEQ ID NO: 5; and/or (e.g., and) a CDR-L3 having no more than 3 amino acid variations (e.g., no more than 3, 2, or 1 amino acid variation) as compared with the CDR-L3 having the amino acid sequence of SEQ ID NO: 6.

[0136] In some embodiments, the anti-TfR antibody of the present disclosure comprises a VH comprising the amino acid sequence of SEQ ID NO: 7. Alternatively or in addition (e.g., in addition), the anti-TfR antibody of the present disclosure comprises a VL comprising the amino acid sequence of SEQ ID NO: 8.

[0137] In some embodiments, the anti-TfR antibody of the present disclosure comprises a VH containing no more than 25 amino acid variations (e.g., no more than 25, 24, 23, 22, 21, 20, 19, 18, 17, 16, 15, 14, 13, 12, 11, 10, 9, 8, 7, 6, 5, 4, 3, 2, or 1 amino acid variation) no more than 25 amino acid variations (e.g., no more than 25, 24, 23, 22, 21, 20, 19, 18, 17, 16, 15, 14, 13, 12, 11, 10, 9, 8, 7, 6, 5, 4, 3, 2, or 1 amino acid variation) as compared with the VH as set forth in SEQ ID NO: 7. Alternatively or in addition (e.g., in addition), the anti-TfR antibody of the present disclosure comprises a VL containing no more than 25 amino acid variations (e.g., no more than 25, 24, 23, 22, 21, 20, 19, 18, 17, 16, 15, 14, 13, 12, 11, 10, 9, 8, 7, 6, 5, 4, 3, 2, or 1 amino acid variation) as compared with the VL as set forth in SEQ ID NO: 8.

[0138] In some embodiments, the anti-TfR antibody of the present disclosure comprises a VH comprising an amino acid sequence that is at least 75% (e.g., 75%, 80%, 85%, 90%, 95%, 98%, or 99%) identical to the VH as set forth in SEQ ID NO: 7. Alternatively or in addition (e.g., in addition), the anti-TfR antibody of the present disclosure comprises a VL comprising an amino acid sequence that is at least 75% (e.g., 75%, 80%, 85%, 90%, 95%, 98%, or 99%) identical to the VL as set forth in SEQ ID NO: 8.

[0139] In some embodiments, the anti-TfR antibody of the present disclosure comprises a VH as set forth in SEQ ID NO: 7 with an amino acid substitution at position 55 (e.g., the asparagine at position 55 is substituted, e.g., with any one of Arg (R), Lys (K), Asp (D), Glu (E), Gln (Q), His (H), Ser (S), Thr (T), Tyr (Y), Cys (C), Trp (W), Met (M), Ala (A), Ile (I), Leu (L), Phe (F), Val (V), Pro (P), Gly (G)). Alternatively or in addition (e.g., in addition), the anti-TfR antibody of the present disclosure comprises a VL as set forth in SEQ ID NO: 8. In some embodiments, the amino acid substitution at position 55 of the VH as set forth in SEQ ID NO: 7 is N55T or N55S. Amino acid position 55 in SEQ ID NO: 7 is assigned a number 54 when the VH set forth in SEQ ID NO: 7 is annotated using the Kabat numbering system. When N54T or N54S is referred to herein, it is referring to the mutations using the Kabat numbering system.

[0140] In some embodiments, the anti-TfR antibody of the present disclosure comprises a VH comprising an amino acid substitution at position 64 relative to SEQ ID NO: 7. In some embodiments, the anti-TfR antibody of the present disclosure comprises a VH comprising a Met at a position corresponding to position 64 of SEQ ID NO: 7. Alternatively or in addition (e.g., in addition), the anti-TfR antibody of the present disclosure comprises a VL comprising an amino acid sequence that is at least 80% (e.g., 80%, 85%, 90%, 95%, 98%, 99%, or 100%) identical to the VL as set forth in SEQ ID NO: 8.

[0141] In some embodiments, the anti-TfR antibody of the present disclosure comprises a CDR-H1, a CDR-H2, and a CDR-H3 of a heavy chain variable domain having the amino acid sequence of SEQ ID NO: 15. Alternatively or in addition (e.g., in addition), the anti-TfR antibody of the present disclosure comprises a CDR-L1, a CDR-L2, and a CDR-L3 of a light chain variable domain having the amino acid sequence of SEQ ID NO: 16.

[0142] In some embodiments, the anti-TfR antibody of the present disclosure comprises a CDR-H1 having the amino acid sequence of SEQ ID NO: 9 (according to the IMGT definition system), a CDR-H2 having the amino acid sequence of SEQ ID NO: 10 (according to the IMGT definition system), a CDR-H3 having the amino acid sequence of SEQ ID NO: 11 (according to the IMGT definition system), a CDR-L1 having the amino acid sequence of SEQ ID NO: 12 (according to the IMGT definition system), a CDR-L2 having the amino acid sequence of SEQ ID NO: 13 (according to the IMGT definition system), and a CDR-L3 having the amino acid sequence of SEQ ID NO: 14 (according to the IMGT definition system).

[0143] In some embodiments, anti-TfR antibody of the present disclosure comprises a CDR-H1, a CDR-H2, and a CDR-H3, which collectively contains no more than 5 amino acid variations (e.g., no more than 5, 4, 3, 2, or 1 amino acid variation) as compared with the CDR-H1 having the amino acid sequence of SEQ ID NO: 9, CDR-H2 having the amino acid sequence of SEQ ID NO: 10, and CDR-H3 having the amino acid sequence of SEQ ID NO: 11. Alternatively or in addition (e.g., in addition), the anti-TfR antibody of the present disclosure comprises a CDR-L1, a CDR-L2, and a CDR-L3, which collectively contains no more than 5 amino acid variations (e.g., no more than 5, 4, 3, 2 or 1 amino acid variation) as compared with the CDR-L1 having the amino acid sequence of SEQ ID NO: 12, CDR-L2 having the amino acid sequence of SEQ ID NO: 13, and CDR-L3 having the amino acid sequence of SEQ ID NO: 14.

[0144] In some embodiments, the anti-TfR antibody of the present disclosure comprises a CDR-H1, a CDR-H2, and a CDR-H3 that collectively are at least 75% (e.g., 75%, 80%, 85%, 90%, 95%, 98%, or 99%) identical to the CDR-H1 having the amino acid sequence of SEQ ID NO: 9, CDR-H2 having the amino acid sequence of SEQ ID NO: 10, and CDR-H3 having the amino acid sequence of SEQ ID NO: 11. Alternatively or in addition (e.g., in addition), the anti-TfR antibody of the present disclosure comprises a CDR-L1, a CDR-L2, and a CDR-L3 that collectively are at least 75% (e.g., 75%, 80%, 85%, 90%, 95%, 98%, or 99%) identical to the to the CDR-L1 having the amino acid sequence of SEQ ID NO: 12, CDR-L2 having the amino acid sequence of SEQ ID NO: 13, and CDR-L3 having the amino acid sequence of SEQ ID NO: 14.

[0145] In some embodiments, the anti-TfR antibody of the present disclosure comprises: a CDR-H1 having no more than 3 amino acid variations (e.g., no more than 3, 2, or 1 amino acid variation) as compared with the CDR-H1 having the amino acid sequence of SEQ ID NO: 9; a CDR-H2 having no more than 3 amino acid variations (e.g., no more than 3, 2, or 1 amino acid variation) as compared with the CDR-H2 having the amino acid sequence of SEQ ID NO: 10; and/or (e.g., and) a CDR-H3 having no more than 3 amino acid variations (e.g., no more than 3, 2, or 1 amino acid variation) as compared with the CDR-H3 having the amino acid sequence of SEQ ID NO: 11. Alternatively or in addition (e.g., in addition), the anti-TfR antibody of the present disclosure comprises: a CDR-L1 having no more than 3 amino acid variations (e.g., no more than 3, 2, or 1 amino acid variation) as compared with the CDR-L1 having the amino acid sequence of SEQ ID NO: 12; a CDR-L2 having no more than 3 amino acid variations (e.g., no more than 3, 2, or 1 amino acid variation) as compared with the CDR-L2 having the amino acid sequence of SEQ ID NO: 13; and/or (e.g., and) a CDR-L3 having no more than 3 amino acid variations (e.g., no more than 3, 2, or 1 amino acid variation) as compared with the CDR-L3 having the amino acid sequence of SEQ ID NO: 14.

[0146] In some embodiments, the anti-TfR antibody of the present disclosure comprises a VH comprising the amino acid sequence of SEQ ID NO: 15. Alternatively or in addition (e.g., in addition), the anti-TfR antibody of the present disclosure comprises a VL comprising the amino acid sequence of SEQ ID NO: 16.

[0147] In some embodiments, the anti-TfR antibody of the present disclosure comprises a VH containing no more than 25 amino acid variations (e.g., no more than 25, 24, 23, 22, 21, 20, 19, 18, 17, 16, 15, 14, 13, 12, 11, 10, 9, 8, 7, 6, 5, 4, 3, 2, or 1 amino acid variation) as compared with the VH as set forth in SEQ ID NO: 15. Alternatively or in addition (e.g., in addition), the anti-TfR antibody of the present disclosure comprises a VL containing no more than 25 amino acid variations (e.g., no more than 25, 24, 23, 22, 21, 20, 19, 18, 17, 16, 15, 14, 13, 12, 11, 10, 9, 8, 7, 6, 5, 4, 3, 2, or 1 amino acid variation) as compared with the VL as set forth in SEQ ID NO: 16.

[0148] In some embodiments, the anti-TfR antibody of the present disclosure comprises a VH comprising an amino acid sequence that is at least 75% (e.g., 75%, 80%, 85%, 90%, 95%, 98%, or 99%) identical to the VH as set forth in SEQ ID NO: 15. Alternatively or in addition (e.g., in addition), the anti-TfR antibody of the present disclosure comprises a VL comprising an amino acid sequence that is at least 75% (e.g., 75%, 80%, 85%, 90%, 95%, 98%, or 99%) identical to the VL as set forth in SEQ ID NO: 16.

[0149] In some embodiments, the anti-TfR antibody of the present disclosure comprises a CDR-H1, a CDR-H2, and a CDR-H3 of a heavy chain variable domain having the amino acid sequence of SEQ ID NO: 23. Alternatively or in addition (e.g., in addition), the anti-TfR antibody of the present disclosure comprises a CDR-L1, a CDR-L2, and a CDR-L3 of a light chain variable domain having the amino acid sequence of SEQ ID NO: 24.

[0150] In some embodiments, the anti-TfR antibody of the present disclosure comprises a CDR-H1 having the amino acid sequence of SEQ ID NO: 17 (according to the IMGT definition system), a CDR-H2 having the amino acid sequence of SEQ ID NO: 18 (according to the IMGT definition system), a CDR-H3 having the amino acid sequence of SEQ ID NO: 19 (according to the IMGT definition system), a CDR-L1 having the amino acid sequence of SEQ ID NO: 20 (according to the IMGT definition system), a CDR-L2 having the amino acid sequence of SEQ ID NO: 21 (according to the IMGT definition system), and a CDR-L3 having the amino acid sequence of SEQ ID NO: 22 (according to the IMGT definition system).

[0151] In some embodiments, the anti-TfR antibody of the present disclosure comprises: a CDR-H1 having the amino acid sequence of SEQ ID NO: 17 with an amino acid substitution at position 8 (e.g., the cysteine at position 8 is substituted, e.g., with any one of Arg (R), Lys (K), Asp (D), Glu (E), Gln (Q), His (H), Ser (S), Thr (T), Tyr (Y), Asn (N), Trp (W), Met (M), Ala (A), Ile (I), Leu (L), Phe (F), Val (V), Pro (P), Gly (G)); a CDR-H2 having the amino acid sequence of SEQ ID NO: 18; and a CDR-H3 having the amino acid sequence of SEQ ID NO: 19. Alternatively or in addition (e.g., in addition), the anti-TfR antibody of the present disclosure comprises: a CDR-L1 having the amino acid sequence of SEQ ID NO: 20; a CDR-L2 having the amino acid sequence of SEQ ID NO: 21; and a CDR-L3 having the amino acid sequence of SEQ ID NO: 22. In some embodiments, the amino acid substitution at position 8 of the CDR-H1 as set forth in SEQ ID NO: 17 is C8D or C8Y.

[0152] In some embodiments, the anti-TfR antibody of the present disclosure comprises: a CDR-H1 having the amino acid sequence of SEQ ID NO: 735 or SEQ ID NO: 737; a CDR-H2 having the amino acid sequence of SEQ ID NO: 18; and a CDR-H3 having the amino acid sequence of SEQ ID NO: 19. Alternatively or in addition (e.g., in addition), the anti-TfR antibody of the present disclosure comprises: a CDR-L1 having the amino acid sequence of SEQ ID NO: 20; a CDR-L2 having the amino acid sequence of SEQ ID NO: 21; and a CDR-L3 having the amino acid sequence of SEQ ID NO: 22.

[0153] In some embodiments, anti-TfR antibody of the present disclosure comprises a CDR-H1, a CDR-H2, and a CDR-H3, which collectively contains no more than 5 amino acid variations (e.g., no more than 5, 4, 3, 2, or 1 amino acid variation) as compared with the CDR-H1 having the amino acid sequence of SEQ ID NO: 17, SEQ ID NO: 735, or SEQ ID NO: 737, CDR-H2 having the amino acid sequence of SEQ ID NO: 18, and CDR-H3 having the amino acid sequence of SEQ ID NO: 19. Alternatively or in addition (e.g., in addition), the anti-TfR antibody of the present disclosure comprises a CDR-L1, a CDR-L2, and a CDR-L3, which collectively contains no more than 5 amino acid variations (e.g., no more than 5, 4, 3, 2 or 1 amino acid variation) as compared with the CDR-L1 having the amino acid sequence of SEQ ID NO: 20, CDR-L2 having the amino acid sequence of SEQ ID NO: 21, and CDR-L3 having the amino acid sequence of SEQ ID NO: 22.

[0154] In some embodiments, the anti-TfR antibody of the present disclosure comprises a CDR-H1, a CDR-H2, and a CDR-H3 that collectively are at least 75% (e.g., 75%, 80%, 85%, 90%, 95%, 98%, or 99%) identical to the CDR-H1 having the amino acid sequence of SEQ ID NO: 17, SEQ ID NO: 735, or SEQ ID NO: 737, CDR-H2 having the amino acid sequence of SEQ ID NO: 18, and CDR-H3 having the amino acid sequence of SEQ ID NO: 19. Alternatively or in addition (e.g., in addition), the anti-TfR antibody of the present disclosure comprises a CDR-L1, a CDR-L2, and a CDR-L3 that collectively are at least 75% (e.g., 75%, 80%, 85%, 90%, 95%, 98%, or 99%) identical to the to the CDR-L1 having the amino acid sequence of SEQ ID NO: 20, CDR-L2 having the amino acid sequence of SEQ ID NO: 21, and CDR-L3 having the amino acid sequence of SEQ ID NO: 22.

[0155] In some embodiments, the anti-TfR antibody of the present disclosure comprises: a CDR-H1 having no more than 3 amino acid variations (e.g., no more than 3, 2, or 1 amino acid variation) as compared with the CDR-H1 having the amino acid sequence of SEQ ID NO: 17, SEQ ID NO: 735, or SEQ ID NO: 737; a CDR-H2 having no more than 3 amino acid variations (e.g., no more than 3, 2, or 1 amino acid variation) as compared with the CDR-H2 having the amino acid sequence of SEQ ID NO: 18; and/or (e.g., and) a CDR-H3 having no more than 3 amino acid variations (e.g., no more than 3, 2, or 1 amino acid variation) as compared with the CDR-H3 having the amino acid sequence of SEQ ID NO: 19. Alternatively or in addition (e.g., in addition), the anti-TfR antibody of the present disclosure comprises: a CDR-L1 having no more than 3 amino acid variations (e.g., no more than 3, 2, or 1 amino acid variation) as compared with the CDR-L1 having the amino acid sequence of SEQ ID NO: 20; a CDR-L2 having no more than 3 amino acid variations (e.g., no more than 3, 2, or 1 amino acid variation) as compared with the CDR-L2 having the amino acid sequence of SEQ ID NO: 21; and/or (e.g., and) a CDR-L3 having no more than 3 amino acid variations (e.g., no more than 3, 2, or 1 amino acid variation) as compared with the CDR-L3 having the amino acid sequence of SEQ ID NO: 22.

[0156] In some embodiments, the anti-TfR antibody of the present disclosure comprises a VH comprising the amino acid sequence of SEQ ID NO: 23. Alternatively or in addition (e.g., in addition), the anti-TfR antibody of the present disclosure comprises a VL comprising the amino acid sequence of SEQ ID NO: 24.

[0157] In some embodiments, the anti-TfR antibody of the present disclosure comprises a VH containing no more than 25 amino acid variations (e.g., no more than 25, 24, 23, 22, 21, 20, 19, 18, 17, 16, 15, 14, 13, 12, 11, 10, 9, 8, 7, 6, 5, 4, 3, 2, or 1 amino acid variation)no more than 25 amino acid variations (e.g., no more than 25, 24, 23, 22, 21, 20, 19, 18, 17, 16, 15, 14, 13, 12, 11, 10, 9, 8, 7, 6, 5, 4, 3, 2, or 1 amino acid variation) as compared with the VH as set forth in SEQ ID NO: 23. Alternatively or in addition (e.g., in addition), the anti-TfR antibody of the present disclosure comprises a VL containing no more than 25 amino acid variations (e.g., no more than 25, 24, 23, 22, 21, 20, 19, 18, 17, 16, 15, 14, 13, 12, 11, 10, 9, 8, 7, 6, 5, 4, 3, 2, or 1 amino acid variation) as compared with the VL as set forth in SEQ ID NO: 24.

[0158] In some embodiments, the anti-TfR antibody of the present disclosure comprises a VH comprising an amino acid sequence that is at least 75% (e.g., 75%, 80%, 85%, 90%, 95%, 98%, or 99%) identical to the VH as set forth in SEQ ID NO: 23. Alternatively or in addition (e.g., in addition), the anti-TfR antibody of the present disclosure comprises a VL comprising an amino acid sequence that is at least 75% (e.g., 75%, 80%, 85%, 90%, 95%, 98%, or 99%) identical to the VL as set forth in SEQ ID NO: 24.

[0159] In some embodiments, the anti-TfR antibody of the present disclosure comprises a VH as set forth in SEQ ID NO: 23 with an amino acid substitution at position 33 (e.g., the cysteine at position 33 is substituted, e.g., with any one of Arg (R), Lys (K), Asp (D), Glu (E), Gln (Q), His (H), Ser (S), Thr (T), Tyr (Y), Asn (N), Trp (W), Met (M), Ala (A), Ile (I), Leu (L), Phe (F), Val (V), Pro (P), Gly (G)). Alternatively or in addition (e.g., in addition), the anti-TfR antibody of the present disclosure comprises a VL as set forth in SEQ ID NO: 24. In some embodiments, the amino acid substitution at position 33 of the VH as set forth in SEQ ID NO: 23 is C33D or C33Y. Amino acid 33 in SEQ ID NO: 23 is assigned a number 33 when the VH set forth in SEQ ID NO: 23 is annotated with the Kabat numbering system.

[0160] In some embodiments, the anti-TfR antibody of the present disclosure comprises a CDR-H1, a CDR-H2, and a CDR-H3 of a heavy chain variable domain having the amino acid sequence of SEQ ID NO: 31. Alternatively or in addition (e.g., in addition), the anti-TfR antibody of the present disclosure comprises a CDR-L1, a CDR-L2, and a CDR-L3 of a light chain variable domain having the amino acid sequence of SEQ ID NO: 32.

[0161] In some embodiments, the anti-TfR antibody of the present disclosure comprises a CDR-H1 having the amino acid sequence of SEQ ID NO: 25 (according to the IMGT definition system), a CDR-H2 having the amino acid sequence of SEQ ID NO: 26 (according to the IMGT definition system), a CDR-H3 having the amino acid sequence of SEQ ID NO: 27 (according to the IMGT definition system), a CDR-L1 having the amino acid sequence of SEQ ID NO: 28 (according to the IMGT definition system), a CDR-L2 having the amino acid sequence of SEQ ID NO: 29 (according to the IMGT definition system), and a CDR-L3 having the amino acid sequence of SEQ ID NO: 30 (according to the IMGT definition system).

[0162] In some embodiments, anti-TfR antibody of the present disclosure comprises a CDR-H1, a CDR-H2, and a CDR-H3, which collectively contains no more than 5 amino acid variations (e.g., no more than 5, 4, 3, 2, or 1 amino acid variation) as compared with the CDR-H1 having the amino acid sequence of SEQ ID NO: 25, CDR-H2 having the amino acid sequence of SEQ ID NO: 26, and CDR-H3 having the amino acid sequence of SEQ ID NO: 27. Alternatively or in addition (e.g., in addition), the anti-TfR antibody of the present disclosure comprises a CDR-L1, a CDR-L2, and a CDR-L3, which collectively contains no more than 5 amino acid variations (e.g., no more than 5, 4, 3, 2 or 1 amino acid variation) as compared with the CDR-L1 having the amino acid sequence of SEQ ID NO: 28, CDR-L2 having the amino acid sequence of SEQ ID NO: 29, and CDR-L3 having the amino acid sequence of SEQ ID NO: 30.

[0163] In some embodiments, the anti-TfR antibody of the present disclosure comprises a CDR-H1, a CDR-H2, and a CDR-H3 that collectively are at least 75% (e.g., 75%, 80%, 85%, 90%, 95%, 98%, or 99%) identical to the CDR-H1 having the amino acid sequence of SEQ ID NO: 25, CDR-H2 having the amino acid sequence of SEQ ID NO: 26, and CDR-H3 having the amino acid sequence of SEQ ID NO: 27. Alternatively or in addition (e.g., in addition), the anti-TfR antibody of the present disclosure comprises a CDR-L1, a CDR-L2, and a CDR-L3 that collectively are at least 75% (e.g., 75%, 80%, 85%, 90%, 95%, 98%, or 99%) identical to the to the CDR-L1 having the amino acid sequence of SEQ ID NO: 28, CDR-L2 having the amino acid sequence of SEQ ID NO: 29, and CDR-L3 having the amino acid sequence of SEQ ID NO: 30.

[0164] In some embodiments, the anti-TfR antibody of the present disclosure comprises: a CDR-H1 having no more than 3 amino acid variations (e.g., no more than 3, 2, or 1 amino acid variation) as compared with the CDR-H1 having the amino acid sequence of SEQ ID NO: 25; a CDR-H2 having no more than 3 amino acid variations (e.g., no more than 3, 2, or 1 amino acid variation) as compared with the CDR-H2 having the amino acid sequence of SEQ ID NO: 26; and/or (e.g., and) a CDR-H3 having no more than 3 amino acid variations (e.g., no more than 3, 2, or 1 amino acid variation) as compared with the CDR-H3 having the amino acid sequence of SEQ ID NO: 27. Alternatively or in addition (e.g., in addition), the anti-TfR antibody of the present disclosure comprises: a CDR-L1 having no more than 3 amino acid variations (e.g., no more than 3, 2, or 1 amino acid variation) as compared with the CDR-L1 having the amino acid sequence of SEQ ID NO: 28; a CDR-L2 having no more than 3 amino acid variations (e.g., no more than 3, 2, or 1 amino acid variation) as compared with the CDR-L2 having the amino acid sequence of SEQ ID NO: 29; and/or (e.g., and) a CDR-L3 having no more than 3 amino acid variations (e.g., no more than 3, 2, or 1 amino acid variation) as compared with the CDR-L3 having the amino acid sequence of SEQ ID NO: 30.

[0165] In some embodiments, the anti-TfR antibody of the present disclosure comprises a VH comprising the amino acid sequence of SEQ ID NO: 31. Alternatively or in addition (e.g., in addition), the anti-TfR antibody of the present disclosure comprises a VL comprising the amino acid sequence of SEQ ID NO: 32.

[0166] In some embodiments, the anti-TfR antibody of the present disclosure comprises a VH containing no more than 25 amino acid variations (e.g., no more than 25, 24, 23, 22, 21, 20, 19, 18, 17, 16, 15, 14, 13, 12, 11, 10, 9, 8, 7, 6, 5, 4, 3, 2, or 1 amino acid variation)no more than 25 amino acid variations (e.g., no more than 25, 24, 23, 22, 21, 20, 19, 18, 17, 16, 15, 14, 13, 12, 11, 10, 9, 8, 7, 6, 5, 4, 3, 2, or 1 amino acid variation) as compared with the VH as set forth in SEQ ID NO: 31. Alternatively or in addition (e.g., in addition), the anti-TfR antibody of the present disclosure comprises a VL containing no more than 25 amino acid variations (e.g., no more than 25, 24, 23, 22, 21, 20, 19, 18, 17, 16, 15, 14, 13, 12, 11, 10, 9, 8, 7, 6, 5, 4, 3, 2, or 1 amino acid variation) as compared with the VL as set forth in SEQ ID NO: 32.

[0167] In some embodiments, the anti-TfR antibody of the present disclosure comprises a VH comprising an amino acid sequence that is at least 75% (e.g., 75%, 80%, 85%, 90%, 95%, 98%, or 99%) identical to the VH as set forth in SEQ ID NO: 31. Alternatively or in addition (e.g., in addition), the anti-TfR antibody of the present disclosure comprises a VL comprising an amino acid sequence that is at least 75% (e.g., 75%, 80%, 85%, 90%, 95%, 98%, or 99%) identical to the VL as set forth in SEQ ID NO: 32.

[0168] In some embodiments, the anti-TfR antibody of the present disclosure comprises a CDR-H1, a CDR-H2, and a CDR-H3 of a heavy chain variable domain having the amino acid sequence of SEQ ID NO: 39. Alternatively or in addition (e.g., in addition), the anti-TfR antibody of the present disclosure comprises a CDR-L1, a CDR-L2, and a CDR-L3 of a light chain variable domain having the amino acid sequence of SEQ ID NO: 40.

[0169] In some embodiments, the anti-TfR antibody of the present disclosure comprises a CDR-H1 having the amino acid sequence of SEQ ID NO: 33 (according to the IMGT definition system), a CDR-H2 having the amino acid sequence of SEQ ID NO: 34 (according to the IMGT definition system), a CDR-H3 having the amino acid sequence of SEQ ID NO: 35 (according to the IMGT definition system), a CDR-L1 having the amino acid sequence of SEQ ID NO: 36 (according to the IMGT definition system), a CDR-L2 having the amino acid sequence of SEQ ID NO: 37 (according to the IMGT definition system), and a CDR-L3 having the amino acid sequence of SEQ ID NO: 38 (according to the IMGT definition system).

[0170] In some embodiments, anti-TfR antibody of the present disclosure comprises a CDR-H1, a CDR-H2, and a CDR-H3, which collectively contains no more than 5 amino acid variations (e.g., no more than 5, 4, 3, 2, or 1 amino acid variation) as compared with the CDR-H1 having the amino acid sequence of SEQ ID NO: 33, CDR-H2 having the amino acid sequence of SEQ ID NO: 34, and CDR-H3 having the amino acid sequence of SEQ ID NO: 35. Alternatively or in addition (e.g., in addition), the anti-TfR antibody of the present disclosure comprises a CDR-L1, a CDR-L2, and a CDR-L3, which collectively contains no more than 5 amino acid variations (e.g., no more than 5, 4, 3, 2 or 1 amino acid variation) as compared with the CDR-L1 having the amino acid sequence of SEQ ID NO: 36, CDR-L2 having the amino acid sequence of SEQ ID NO: 37, and CDR-L3 having the amino acid sequence of SEQ ID NO: 38.

[0171] In some embodiments, the anti-TfR antibody of the present disclosure comprises a CDR-H1, a CDR-H2, and a CDR-H3 that collectively are at least 75% (e.g., 75%, 80%, 85%, 90%, 95%, 98%, or 99%) identical to the CDR-H1 having the amino acid sequence of SEQ ID NO: 33, CDR-H2 having the amino acid sequence of SEQ ID NO: 34, and CDR-H3 having the amino acid sequence of SEQ ID NO: 35. Alternatively or in addition (e.g., in addition), the anti-TfR antibody of the present disclosure comprises a CDR-L1, a CDR-L2, and a CDR-L3 that collectively are at least 75% (e.g., 75%, 80%, 85%, 90%, 95%, 98%, or 99%) identical to the to the CDR-L1 having the amino acid sequence of SEQ ID NO: 36, CDR-L2 having the amino acid sequence of SEQ ID NO: 37, and CDR-L3 having the amino acid sequence of SEQ ID NO: 38.

[0172] In some embodiments, the anti-TfR antibody of the present disclosure comprises: a CDR-H1 having no more than 3 amino acid variations (e.g., no more than 3, 2, or 1 amino acid variation) as compared with the CDR-H1 having the amino acid sequence of SEQ ID NO: 33; a CDR-H2 having no more than 3 amino acid variations (e.g., no more than 3, 2, or 1 amino acid variation) as compared with the CDR-H2 having the amino acid sequence of SEQ ID NO: 34; and/or (e.g., and) a CDR-H3 having no more than 3 amino acid variations (e.g., no more than 3, 2, or 1 amino acid variation) as compared with the CDR-H3 having the amino acid sequence of SEQ ID NO: 35. Alternatively or in addition (e.g., in addition), the anti-TfR antibody of the present disclosure comprises: a CDR-L1 having no more than 3 amino acid variations (e.g., no more than 3, 2, or 1 amino acid variation) as compared with the CDR-L1 having the amino acid sequence of SEQ ID NO: 36; a CDR-L2 having no more than 3 amino acid variations (e.g., no more than 3, 2, or 1 amino acid variation) as compared with the CDR-L2 having the amino acid sequence of SEQ ID NO: 37; and/or (e.g., and) a CDR-L3 having no more than 3 amino acid variations (e.g., no more than 3, 2, or 1 amino acid variation) as compared with the CDR-L3 having the amino acid sequence of SEQ ID NO: 38.

[0173] In some embodiments, the anti-TfR antibody of the present disclosure comprises a VH comprising the amino acid sequence of SEQ ID NO: 39. Alternatively or in addition (e.g., in addition), the anti-TfR antibody of the present disclosure comprises a VL comprising the amino acid sequence of SEQ ID NO: 40.

[0174] In some embodiments, the anti-TfR antibody of the present disclosure comprises a VH containing no more than 25 amino acid variations (e.g., no more than 25, 24, 23, 22, 21, 20, 19, 18, 17, 16, 15, 14, 13, 12, 11, 10, 9, 8, 7, 6, 5, 4, 3, 2, or 1 amino acid variation)no more than 25 amino acid variations (e.g., no more than 25, 24, 23, 22, 21, 20, 19, 18, 17, 16, 15, 14, 13, 12, 11, 10, 9, 8, 7, 6, 5, 4, 3, 2, or 1 amino acid variation) as compared with the VH as set forth in SEQ ID NO: 39. Alternatively or in addition (e.g., in addition), the anti-TfR antibody of the present disclosure comprises a VL containing no more than 25 amino acid variations (e.g., no more than 25, 24, 23, 22, 21, 20, 19, 18, 17, 16, 15, 14, 13, 12, 11, 10, 9, 8, 7, 6, 5, 4, 3, 2, or 1 amino acid variation) as compared with the VL as set forth in SEQ ID NO: 40.

[0175] In some embodiments, the anti-TfR antibody of the present disclosure comprises a VH comprising an amino acid sequence that is at least 75% (e.g., 75%, 80%, 85%, 90%, 95%, 98%, or 99%) identical to the VH as set forth in SEQ ID NO: 39. Alternatively or in addition (e.g., in addition), the anti-TfR antibody of the present disclosure comprises a VL comprising an amino acid sequence that is at least 75% (e.g., 75%, 80%, 85%, 90%, 95%, 98%, or 99%) identical to the VL as set forth in SEQ ID NO: 40.

[0176] In some embodiments, the anti-TfR antibody of the present disclosure comprises a CDR-H1, a CDR-H2, and a CDR-H3 of a heavy chain variable domain having the amino acid sequence of SEQ ID NO: 47. Alternatively or in addition (e.g., in addition), the anti-TfR antibody of the present disclosure comprises a CDR-L1, a CDR-L2, and a CDR-L3 of a light chain variable domain having the amino acid sequence of SEQ ID NO: 48.

[0177] In some embodiments, the anti-TfR antibody of the present disclosure comprises a CDR-H1 having the amino acid sequence of SEQ ID NO: 41 (according to the IMGT definition system), a CDR-H2 having the amino acid sequence of SEQ ID NO: 42 (according to the IMGT definition system), a CDR-H3 having the amino acid sequence of SEQ ID NO: 43 (according to the IMGT definition system), a CDR-L1 having the amino acid sequence of SEQ ID NO: 44 (according to the IMGT definition system), a CDR-L2 having the amino acid sequence of SEQ ID NO: 45 (according to the IMGT definition system), and a CDR-L3 having the amino acid sequence of SEQ ID NO: 46 (according to the IMGT definition system).

[0178] In some embodiments, anti-TfR antibody of the present disclosure comprises a CDR-H1, a CDR-H2, and a CDR-H3, which collectively contains no more than 5 amino acid variations (e.g., no more than 5, 4, 3, 2, or 1 amino acid variation) as compared with the CDR-H1 having the amino acid sequence of SEQ ID NO: 41, CDR-H2 having the amino acid sequence of SEQ ID NO: 42, and CDR-H3 having the amino acid sequence of SEQ ID NO: 43. Alternatively or in addition (e.g., in addition), the anti-TfR antibody of the present disclosure comprises a CDR-L1, a CDR-L2, and a CDR-L3, which collectively contains no more than 5 amino acid variations (e.g., no more than 5, 4, 3, 2 or 1 amino acid variation) as compared with the CDR-L1 having the amino acid sequence of SEQ ID NO: 44, CDR-L2 having the amino acid sequence of SEQ ID NO: 45, and CDR-L3 having the amino acid sequence of SEQ ID NO: 46.

[0179] In some embodiments, the anti-TfR antibody of the present disclosure comprises a CDR-H1, a CDR-H2, and a CDR-H3 that collectively are at least 75% (e.g., 75%, 80%, 85%, 90%, 95%, 98%, or 99%) identical to the CDR-H1 having the amino acid sequence of SEQ ID NO: 41, CDR-H2 having the amino acid sequence of SEQ ID NO: 42, and CDR-H3 having the amino acid sequence of SEQ ID NO: 43. Alternatively or in addition (e.g., in addition), the anti-TfR antibody of the present disclosure comprises a CDR-L1, a CDR-L2, and a CDR-L3 that collectively are at least 75% (e.g., 75%, 80%, 85%, 90%, 95%, 98%, or 99%) identical to the to the CDR-L1 having the amino acid sequence of SEQ ID NO: 44, CDR-L2 having the amino acid sequence of SEQ ID NO: 45, and CDR-L3 having the amino acid sequence of SEQ ID NO: 46.

[0180] In some embodiments, the anti-TfR antibody of the present disclosure comprises: a CDR-H1 having no more than 3 amino acid variations (e.g., no more than 3, 2, or 1 amino acid variation) as compared with the CDR-H1 having the amino acid sequence of SEQ ID NO: 41; a CDR-H2 having no more than 3 amino acid variations (e.g., no more than 3, 2, or 1 amino acid variation) as compared with the CDR-H2 having the amino acid sequence of SEQ ID NO: 42; and/or (e.g., and) a CDR-H3 having no more than 3 amino acid variations (e.g., no more than 3, 2, or 1 amino acid variation) as compared with the CDR-H3 having the amino acid sequence of SEQ ID NO: 43. Alternatively or in addition (e.g., in addition), the anti-TfR antibody of the present disclosure comprises: a CDR-L1 having no more than 3 amino acid variations (e.g., no more than 3, 2, or 1 amino acid variation) as compared with the CDR-L1 having the amino acid sequence of SEQ ID NO: 44; a CDR-L2 having no more than 3 amino acid variations (e.g., no more than 3, 2, or 1 amino acid variation) as compared with the CDR-L2 having the amino acid sequence of SEQ ID NO: 45; and/or (e.g., and) a CDR-L3 having no more than 3 amino acid variations (e.g., no more than 3, 2, or 1 amino acid variation) as compared with the CDR-L3 having the amino acid sequence of SEQ ID NO: 46.

[0181] In some embodiments, the anti-TfR antibody of the present disclosure comprises a VH comprising the amino acid sequence of SEQ ID NO: 47. Alternatively or in addition (e.g., in addition), the anti-TfR antibody of the present disclosure comprises a VL comprising the amino acid sequence of SEQ ID NO: 48.

[0182] In some embodiments, the anti-TfR antibody of the present disclosure comprises a VH containing no more than 25 amino acid variations (e.g., no more than 25, 24, 23, 22, 21, 20, 19, 18, 17, 16, 15, 14, 13, 12, 11, 10, 9, 8, 7, 6, 5, 4, 3, 2, or 1 amino acid variation)no more than 25 amino acid variations (e.g., no more than 25, 24, 23, 22, 21, 20, 19, 18, 17, 16, 15, 14, 13, 12, 11, 10, 9, 8, 7, 6, 5, 4, 3, 2, or 1 amino acid variation) as compared with the VH as set forth in SEQ ID NO: 47. Alternatively or in addition (e.g., in addition), the anti-TfR antibody of the present disclosure comprises a VL containing no more than 25 amino acid variations (e.g., no more than 25, 24, 23, 22, 21, 20, 19, 18, 17, 16, 15, 14, 13, 12, 11, 10, 9, 8, 7, 6, 5, 4, 3, 2, or 1 amino acid variation) as compared with the VL as set forth in SEQ ID NO: 48.

[0183] In some embodiments, the anti-TfR antibody of the present disclosure comprises a VH comprising an amino acid sequence that is at least 75% (e.g., 75%, 80%, 85%, 90%, 95%, 98%, or 99%) identical to the VH as set forth in SEQ ID NO: 47. Alternatively or in addition (e.g., in addition), the anti-TfR antibody of the present disclosure comprises a VL comprising an amino acid sequence that is at least 75% (e.g., 75%, 80%, 85%, 90%, 95%, 98%, or 99%) identical to the VL as set forth in SEQ ID NO: 48.

[0184] In some embodiments, the anti-TfR antibody of the present disclosure comprises a CDR-H1, a CDR-H2, and a CDR-H3 of a heavy chain variable domain having the amino acid sequence of SEQ ID NO: 54. Alternatively or in addition (e.g., in addition), the anti-TfR antibody of the present disclosure comprises a CDR-L1, a CDR-L2, and a CDR-L3 of a light chain variable domain having the amino acid sequence of SEQ ID NO: 55.

[0185] In some embodiments, the anti-TfR antibody of the present disclosure comprises a CDR-H1 having the amino acid sequence of SEQ ID NO: 49 (according to the IMGT definition system), a CDR-H2 having the amino acid sequence of SEQ ID NO: 50 (according to the IMGT definition system), a CDR-H3 having the amino acid sequence of SEQ ID NO: 51 (according to the IMGT definition system), a CDR-L1 having the amino acid sequence of SEQ ID NO: 52 (according to the IMGT definition system), a CDR-L2 having the amino acid sequence of SEQ ID NO: 29 (according to the IMGT definition system), and a CDR-L3 having the amino acid sequence of SEQ ID NO: 53 (according to the IMGT definition system).

[0186] In some embodiments, anti-TfR antibody of the present disclosure comprises a CDR-H1, a CDR-H2, and a CDR-H3, which collectively contains no more than 5 amino acid variations (e.g., no more than 5, 4, 3, 2, or 1 amino acid variation) as compared with the CDR-H1 having the amino acid sequence of SEQ ID NO: 49, CDR-H2 having the amino acid sequence of SEQ ID NO: 50, and CDR-H3 having the amino acid sequence of SEQ ID NO: 51. Alternatively or in addition (e.g., in addition), the anti-TfR antibody of the present disclosure comprises a CDR-L1, a CDR-L2, and a CDR-L3, which collectively contains no more than 5 amino acid variations (e.g., no more than 5, 4, 3, 2 or 1 amino acid variation) as compared with the CDR-L1 having the amino acid sequence of SEQ ID NO: 52, CDR-L2 having the amino acid sequence of SEQ ID NO: 29, and CDR-L3 having the amino acid sequence of SEQ ID NO: 53.

[0187] In some embodiments, the anti-TfR antibody of the present disclosure comprises a CDR-H1, a CDR-H2, and a CDR-H3 that collectively are at least 75% (e.g., 75%, 80%, 85%, 90%, 95%, 98%, or 99%) identical to the CDR-H1 having the amino acid sequence of SEQ ID NO: 49, CDR-H2 having the amino acid sequence of SEQ ID NO: 50, and CDR-H3 having the amino acid sequence of SEQ ID NO: 51. Alternatively or in addition (e.g., in addition), the anti-TfR antibody of the present disclosure comprises a CDR-L1, a CDR-L2, and a CDR-L3 that collectively are at least 75% (e.g., 75%, 80%, 85%, 90%, 95%, 98%, or 99%) identical to the to the CDR-L1 having the amino acid sequence of SEQ ID NO: 52, CDR-L2 having the amino acid sequence of SEQ ID NO: 29, and CDR-L3 having the amino acid sequence of SEQ ID NO: 53.

[0188] In some embodiments, the anti-TfR antibody of the present disclosure comprises: a CDR-H1 having no more than 3 amino acid variations (e.g., no more than 3, 2, or 1 amino acid variation) as compared with the CDR-H1 having the amino acid sequence of SEQ ID NO: 49; a CDR-H2 having no more than 3 amino acid variations (e.g., no more than 3, 2, or 1 amino acid variation) as compared with the CDR-H2 having the amino acid sequence of SEQ ID NO: 50; and/or (e.g., and) a CDR-H3 having no more than 3 amino acid variations (e.g., no more than 3, 2, or 1 amino acid variation) as compared with the CDR-H3 having the amino acid sequence of SEQ ID NO: 51. Alternatively or in addition (e.g., in addition), the anti-TfR antibody of the present disclosure comprises: a CDR-L1 having no more than 3 amino acid variations (e.g., no more than 3, 2, or 1 amino acid variation) as compared with the CDR-L1 having the amino acid sequence of SEQ ID NO: 52; a CDR-L2 having no more than 3 amino acid variations (e.g., no more than 3, 2, or 1 amino acid variation) as compared with the CDR-L2 having the amino acid sequence of SEQ ID NO: 29; and/or (e.g., and) a CDR-L3 having no more than 3 amino acid variations (e.g., no more than 3, 2, or 1 amino acid variation) as compared with the CDR-L3 having the amino acid sequence of SEQ ID NO: 53.

[0189] In some embodiments, the anti-TfR antibody of the present disclosure comprises a VH comprising the amino acid sequence of SEQ ID NO: 54. Alternatively or in addition (e.g., in addition), the anti-TfR antibody of the present disclosure comprises a VL comprising the amino acid sequence of SEQ ID NO: 55.

[0190] In some embodiments, the anti-TfR antibody of the present disclosure comprises a VH containing no more than 25 amino acid variations (e.g., no more than 25, 24, 23, 22, 21, 20, 19, 18, 17, 16, 15, 14, 13, 12, 11, 10, 9, 8, 7, 6, 5, 4, 3, 2, or 1 amino acid variation)no more than 25 amino acid variations (e.g., no more than 25, 24, 23, 22, 21, 20, 19, 18, 17, 16, 15, 14, 13, 12, 11, 10, 9, 8, 7, 6, 5, 4, 3, 2, or 1 amino acid variation) as compared with the VH as set forth in SEQ ID NO: 54. Alternatively or in addition (e.g., in addition), the anti-TfR antibody of the present disclosure comprises a VL containing no more than 25 amino acid variations (e.g., no more than 25, 24, 23, 22, 21, 20, 19, 18, 17, 16, 15, 14, 13, 12, 11, 10, 9, 8, 7, 6, 5, 4, 3, 2, or 1 amino acid variation) as compared with the VL as set forth in SEQ ID NO: 55.

[0191] In some embodiments, the anti-TfR antibody of the present disclosure comprises a VH comprising an amino acid sequence that is at least 75% (e.g., 75%, 80%, 85%, 90%, 95%, 98%, or 99%) identical to the VH as set forth in SEQ ID NO: 54. Alternatively or in addition (e.g., in addition), the anti-TfR antibody of the present disclosure comprises a VL comprising an amino acid sequence that is at least 75% (e.g., 75%, 80%, 85%, 90%, 95%, 98%, or 99%) identical to the VL as set forth in SEQ ID NO: 55.

[0192] In some embodiments, the anti-TfR antibody of the present disclosure comprises a CDR-H1, a CDR-H2, and a CDR-H3 of a heavy chain variable domain having the amino acid sequence of SEQ ID NO: 62. Alternatively or in addition (e.g., in addition), the anti-TfR antibody of the present disclosure comprises a CDR-L1, a CDR-L2, and a CDR-L3 of a light chain variable domain having the amino acid sequence of SEQ ID NO: 63.

[0193] In some embodiments, the anti-TfR antibody of the present disclosure comprises a CDR-H1 having the amino acid sequence of SEQ ID NO: 56 (according to the IMGT definition system), a CDR-H2 having the amino acid sequence of SEQ ID NO: 57 (according to the IMGT definition system), a CDR-H3 having the amino acid sequence of SEQ ID NO: 58 (according to the IMGT definition system), a CDR-L1 having the amino acid sequence of SEQ ID NO: 59 (according to the IMGT definition system), a CDR-L2 having the amino acid sequence of SEQ ID NO: 60 (according to the IMGT definition system), and a CDR-L3 having the amino acid sequence of SEQ ID NO: 61 (according to the IMGT definition system).

[0194] In some embodiments, anti-TfR antibody of the present disclosure comprises a CDR-H1, a CDR-H2, and a CDR-H3, which collectively contains no more than 5 amino acid H1 having the amino acid sequence of SEQ ID NO: 56, CDR-H2 having the amino acid sequence of SEQ ID NO: 57, and CDR-H3 having the amino acid sequence of SEQ ID NO: 58. Alternatively or in addition (e.g., in addition), the anti-TfR antibody of the present disclosure comprises a CDR-L1, a CDR-L2, and a CDR-L3, which collectively contains no more than 5 amino acid variations (e.g., no more than 5, 4, 3, 2 or 1 amino acid variation) as compared with the CDR-L1 having the amino acid sequence of SEQ ID NO: 59, CDR-L2 having the amino acid sequence of SEQ ID NO: 60, and CDR-L3 having the amino acid sequence of SEQ ID NO: 61.

[0195] In some embodiments, the anti-TfR antibody of the present disclosure comprises a CDR-H1, a CDR-H2, and a CDR-H3 that collectively are at least 75% (e.g., 75%, 80%, 85%, 90%, 95%, 98%, or 99%) identical to the CDR-H1 having the amino acid sequence of SEQ ID NO: 56, CDR-H2 having the amino acid sequence of SEQ ID NO: 57, and CDR-H3 having the amino acid sequence of SEQ ID NO: 58. Alternatively or in addition (e.g., in addition), the anti-TfR antibody of the present disclosure comprises a CDR-L1, a CDR-L2, and a CDR-L3 that collectively are at least 75% (e.g., 75%, 80%, 85%, 90%, 95%, 98%, or 99%) identical to the to the CDR-L1 having the amino acid sequence of SEQ ID NO: 59, CDR-L2 having the amino acid sequence of SEQ ID NO: 60, and CDR-L3 having the amino acid sequence of SEQ ID NO: 61.

[0196] In some embodiments, the anti-TfR antibody of the present disclosure comprises: a CDR-H1 having no more than 3 amino acid variations (e.g., no more than 3, 2, or 1 amino acid variation) as compared with the CDR-H1 having the amino acid sequence of SEQ ID NO: 56; a CDR-H2 having no more than 3 amino acid variations (e.g., no more than 3, 2, or 1 amino acid variation) as compared with the CDR-H2 having the amino acid sequence of SEQ ID NO: 57; and/or (e.g., and) a CDR-H3 having no more than 3 amino acid variations (e.g., no more than 3, 2, or 1 amino acid variation) as compared with the CDR-H3 having the amino acid sequence of SEQ ID NO: 58. Alternatively or in addition (e.g., in addition), the anti-TfR antibody of the present disclosure comprises: a CDR-L1 having no more than 3 amino acid variations (e.g., no more than 3, 2, or 1 amino acid variation) as compared with the CDR-L1 having the amino acid sequence of SEQ ID NO: 59; a CDR-L2 having no more than 3 amino acid variations (e.g., no more than 3, 2, or 1 amino acid variation) as compared with the CDR-L2 having the amino acid sequence of SEQ ID NO: 60; and/or (e.g., and) a CDR-L3 having no more than 3 amino acid variations (e.g., no more than 3, 2, or 1 amino acid variation) as compared with the CDR-L3 having the amino acid sequence of SEQ ID NO: 61.

[0197] In some embodiments, the anti-TfR antibody of the present disclosure comprises a VH comprising the amino acid sequence of SEQ ID NO: 62. Alternatively or in addition (e.g., in addition), the anti-TfR antibody of the present disclosure comprises a VL comprising the amino acid sequence of SEQ ID NO: 63.

[0198] In some embodiments, the anti-TfR antibody of the present disclosure comprises a VH containing no more than 25 amino acid variations (e.g., no more than 25, 24, 23, 22, 21, 20, 19, 18, 17, 16, 15, 14, 13, 12, 11, 10, 9, 8, 7, 6, 5, 4, 3, 2, or 1 amino acid variation)no more than 25 amino acid variations (e.g., no more than 25, 24, 23, 22, 21, 20, 19, 18, 17, 16, 15, 14, 13, 12, 11, 10, 9, 8, 7, 6, 5, 4, 3, 2, or 1 amino acid variation) as compared with the VH as set forth in SEQ ID NO: 62. Alternatively or in addition (e.g., in addition), the anti-TfR antibody of the present disclosure comprises a VL containing no more than 25 amino acid variations (e.g., no more than 25, 24, 23, 22, 21, 20, 19, 18, 17, 16, 15, 14, 13, 12, 11, 10, 9, 8, 7, 6, 5, 4, 3, 2, or 1 amino acid variation) as compared with the VL as set forth in SEQ ID NO: 63.

[0199] In some embodiments, the anti-TfR antibody of the present disclosure comprises a VH comprising an amino acid sequence that is at least 75% (e.g., 75%, 80%, 85%, 90%, 95%, 98%, or 99%) identical to the VH as set forth in SEQ ID NO: 62. Alternatively or in addition (e.g., in addition), the anti-TfR antibody of the present disclosure comprises a VL comprising an amino acid sequence that is at least 75% (e.g., 75%, 80%, 85%, 90%, 95%, 98%, or 99%) identical to the VL as set forth in SEQ ID NO: 63.

[0200] In some embodiments, the anti-TfR antibody of the present disclosure comprises a CDR-H1, a CDR-H2, and a CDR-H3 of a heavy chain variable domain having the amino acid sequence of SEQ ID NO: 70. Alternatively or in addition (e.g., in addition), the anti-TfR antibody of the present disclosure comprises a CDR-L1, a CDR-L2, and a CDR-L3 of a light chain variable domain having the amino acid sequence of SEQ ID NO: 71.

[0201] In some embodiments, the anti-TfR antibody of the present disclosure comprises a CDR-H1 having the amino acid sequence of SEQ ID NO: 64 (according to the IMGT definition system), a CDR-H2 having the amino acid sequence of SEQ ID NO: 65 (according to the IMGT definition system), a CDR-H3 having the amino acid sequence of SEQ ID NO: 66 (according to the IMGT definition system), a CDR-L1 having the amino acid sequence of SEQ ID NO: 67 (according to the IMGT definition system), a CDR-L2 having the amino acid sequence of SEQ ID NO: 68 (according to the IMGT definition system), and a CDR-L3 having the amino acid sequence of SEQ ID NO: 69 (according to the IMGT definition system).

[0202] In some embodiments, anti-TfR antibody of the present disclosure comprises a CDR-H1, a CDR-H2, and a CDR-H3, which collectively contains no more than 5 amino acid variations (e.g., no more than 5, 4, 3, 2, or 1 amino acid variation) as compared with the CDR-H1 having the amino acid sequence of SEQ ID NO: 64, CDR-H2 having the amino acid sequence of SEQ ID NO: 65, and CDR-H3 having the amino acid sequence of SEQ ID NO: 66. Alternatively or in addition (e.g., in addition), the anti-TfR antibody of the present disclosure comprises a CDR-L1, a CDR-L2, and a CDR-L3, which collectively contains no more than 5 amino acid variations (e.g., no more than 5, 4, 3, 2 or 1 amino acid variation) as compared with the CDR-L1 having the amino acid sequence of SEQ ID NO: 67, CDR-L2 having the amino acid sequence of SEQ ID NO: 68, and CDR-L3 having the amino acid sequence of SEQ ID NO: 69.

[0203] In some embodiments, the anti-TfR antibody of the present disclosure comprises a CDR-H1, a CDR-H2, and a CDR-H3 that collectively are at least 75% (e.g., 75%, 80%, 85%, 90%, 95%, 98%, or 99%) identical to the CDR-H1 having the amino acid sequence of SEQ ID NO: 64, CDR-H2 having the amino acid sequence of SEQ ID NO: 65, and CDR-H3 having the amino acid sequence of SEQ ID NO: 66. Alternatively or in addition (e.g., in addition), the anti-TfR antibody of the present disclosure comprises a CDR-L1, a CDR-L2, and a CDR-L3 that collectively are at least 75% (e.g., 75%, 80%, 85%, 90%, 95%, 98%, or 99%) identical to the to the CDR-L1 having the amino acid sequence of SEQ ID NO: 67, CDR-L2 having the amino acid sequence of SEQ ID NO: 68, and CDR-L3 having the amino acid sequence of SEQ ID NO: 69.

[0204] In some embodiments, the anti-TfR antibody of the present disclosure comprises: a CDR-H1 having no more than 3 amino acid variations (e.g., no more than 3, 2, or 1 amino acid variation) as compared with the CDR-H1 having the amino acid sequence of SEQ ID NO: 64; a CDR-H2 having no more than 3 amino acid variations (e.g., no more than 3, 2, or 1 amino acid variation) as compared with the CDR-H2 having the amino acid sequence of SEQ ID NO: 65; and/or (e.g., and) a CDR-H3 having no more than 3 amino acid variations (e.g., no more than 3, 2, or 1 amino acid variation) as compared with the CDR-H3 having the amino acid sequence of SEQ ID NO: 66. Alternatively or in addition (e.g., in addition), the anti-TfR antibody of the present disclosure comprises: a CDR-L1 having no more than 3 amino acid variations (e.g., no more than 3, 2, or 1 amino acid variation) as compared with the CDR-L1 having the amino acid sequence of SEQ ID NO: 67; a CDR-L2 having no more than 3 amino acid variations (e.g., no more than 3, 2, or 1 amino acid variation) as compared with the CDR-L2 having the amino acid sequence of SEQ ID NO: 68; and/or (e.g., and) a CDR-L3 having no more than 3 amino acid variations (e.g., no more than 3, 2, or 1 amino acid variation) as compared with the CDR-L3 having the amino acid sequence of SEQ ID NO: 69.

[0205] In some embodiments, the anti-TfR antibody of the present disclosure comprises a VH comprising the amino acid sequence of SEQ ID NO: 70. Alternatively or in addition (e.g., in addition), the anti-TfR antibody of the present disclosure comprises a VL comprising the amino acid sequence of SEQ ID NO: 71.

[0206] In some embodiments, the anti-TfR antibody of the present disclosure comprises a VH containing no more than 25 amino acid variations (e.g., no more than 25, 24, 23, 22, 21, 20, 19, 18, 17, 16, 15, 14, 13, 12, 11, 10, 9, 8, 7, 6, 5, 4, 3, 2, or 1 amino acid variation)no more than 25 amino acid variations (e.g., no more than 25, 24, 23, 22, 21, 20, 19, 18, 17, 16, 15, 14, 13, 12, 11, 10, 9, 8, 7, 6, 5, 4, 3, 2, or 1 amino acid variation) as compared with the VH as set forth in SEQ ID NO: 70. Alternatively or in addition (e.g., in addition), the anti-TfR antibody of the present disclosure comprises a VL containing no more than 25 amino acid variations (e.g., no more than 25, 24, 23, 22, 21, 20, 19, 18, 17, 16, 15, 14, 13, 12, 11, 10, 9, 8, 7, 6, 5, 4, 3, 2, or 1 amino acid variation) as compared with the VL as set forth in SEQ ID NO: 71.

[0207] In some embodiments, the anti-TfR antibody of the present disclosure comprises a VH comprising an amino acid sequence that is at least 75% (e.g., 75%, 80%, 85%, 90%, 95%, 98%, or 99%) identical to the VH as set forth in SEQ ID NO: 70. Alternatively or in addition (e.g., in addition), the anti-TfR antibody of the present disclosure comprises a VL comprising an amino acid sequence that is at least 75% (e.g., 75%, 80%, 85%, 90%, 95%, 98%, or 99%) identical to the VL as set forth in SEQ ID NO: 71.

[0208] In some embodiments, the anti-TfR antibody of the present disclosure comprises a CDR-H1, a CDR-H2, and a CDR-H3 of a heavy chain variable domain having the amino acid sequence of SEQ ID NO: 77. Alternatively or in addition (e.g., in addition), the anti-TfR antibody of the present disclosure comprises a CDR-L1, a CDR-L2, and a CDR-L3 of a light chain variable domain having the amino acid sequence of SEQ ID NO: 78.

[0209] In some embodiments, the anti-TfR antibody of the present disclosure comprises a CDR-H1 having the amino acid sequence of SEQ ID NO: 72 (according to the IMGT definition system), a CDR-H2 having the amino acid sequence of SEQ ID NO: 73 (according to the IMGT definition system), a CDR-H3 having the amino acid sequence of SEQ ID NO: 74 (according to the IMGT definition system), a CDR-L1 having the amino acid sequence of SEQ ID NO: 75 (according to the IMGT definition system), a CDR-L2 having the amino acid sequence of SEQ ID NO: 45 (according to the IMGT definition system), and a CDR-L3 having the amino acid sequence of SEQ ID NO: 76 (according to the IMGT definition system).

[0210] In some embodiments, anti-TfR antibody of the present disclosure comprises a CDR-H1, a CDR-H2, and a CDR-H3, which collectively contains no more than 5 amino acid variations (e.g., no more than 5, 4, 3, 2, or 1 amino acid variation) as compared with the CDR-H1 having the amino acid sequence of SEQ ID NO: 72, CDR-H2 having the amino acid sequence of SEQ ID NO: 73, and CDR-H3 having the amino acid sequence of SEQ ID NO: 74. Alternatively or in addition (e.g., in addition), the anti-TfR antibody of the present disclosure comprises a CDR-L1, a CDR-L2, and a CDR-L3, which collectively contains no more than 5 amino acid variations (e.g., no more than 5, 4, 3, 2 or 1 amino acid variation) as compared with the CDR-L1 having the amino acid sequence of SEQ ID NO: 75, CDR-L2 having the amino acid sequence of SEQ ID NO: 45, and CDR-L3 having the amino acid sequence of SEQ ID NO: 76.

[0211] In some embodiments, the anti-TfR antibody of the present disclosure comprises a CDR-H1, a CDR-H2, and a CDR-H3 that collectively are at least 75% (e.g., 75%, 80%, 85%, 90%, 95%, 98%, or 99%) identical to the CDR-H1 having the amino acid sequence of SEQ ID NO: 72, CDR-H2 having the amino acid sequence of SEQ ID NO: 73, and CDR-H3 having the amino acid sequence of SEQ ID NO: 74. Alternatively or in addition (e.g., in addition), the anti-TfR antibody of the present disclosure comprises a CDR-L1, a CDR-L2, and a CDR-L3 that collectively are at least 75% (e.g., 75%, 80%, 85%, 90%, 95%, 98%, or 99%) identical to the to the CDR-L1 having the amino acid sequence of SEQ ID NO: 75, CDR-L2 having the amino acid sequence of SEQ ID NO: 45, and CDR-L3 having the amino acid sequence of SEQ ID NO: 76.

[0212] In some embodiments, the anti-TfR antibody of the present disclosure comprises: a CDR-H1 having no more than 3 amino acid variations (e.g., no more than 3, 2, or 1 amino acid variation) as compared with the CDR-H1 having the amino acid sequence of SEQ ID NO: 72; a CDR-H2 having no more than 3 amino acid variations (e.g., no more than 3, 2, or 1 amino acid variation) as compared with the CDR-H2 having the amino acid sequence of SEQ ID NO: 73; and/or (e.g., and) a CDR-H3 having no more than 3 amino acid variations (e.g., no more than 3, 2, or 1 amino acid variation) as compared with the CDR-H3 having the amino acid sequence of SEQ ID NO: 74. Alternatively or in addition (e.g., in addition), the anti-TfR antibody of the present disclosure comprises: a CDR-L1 having no more than 3 amino acid variations (e.g., no more than 3, 2, or 1 amino acid variation) as compared with the CDR-L1 having the amino acid sequence of SEQ ID NO: 75; a CDR-L2 having no more than 3 amino acid variations (e.g., no more than 3, 2, or 1 amino acid variation) as compared with the CDR-L2 having the amino acid sequence of SEQ ID NO: 45; and/or (e.g., and) a CDR-L3 having no more than 3 amino acid variations (e.g., no more than 3, 2, or 1 amino acid variation) as compared with the CDR-L3 having the amino acid sequence of SEQ ID NO: 76.

[0213] In some embodiments, the anti-TfR antibody of the present disclosure comprises a VH comprising the amino acid sequence of SEQ ID NO: 77. Alternatively or in addition (e.g., in addition), the anti-TfR antibody of the present disclosure comprises a VL comprising the amino acid sequence of SEQ ID NO: 78.

[0214] In some embodiments, the anti-TfR antibody of the present disclosure comprises a VH containing no more than 25 amino acid variations (e.g., no more than 25, 24, 23, 22, 21, 20, 19, 18, 17, 16, 15, 14, 13, 12, 11, 10, 9, 8, 7, 6, 5, 4, 3, 2, or 1 amino acid variation)no more than 25 amino acid variations (e.g., no more than 25, 24, 23, 22, 21, 20, 19, 18, 17, 16, 15, 14, 13, 12, 11, 10, 9, 8, 7, 6, 5, 4, 3, 2, or 1 amino acid variation) as compared with the VH as set forth in SEQ ID NO: 77. Alternatively or in addition (e.g., in addition), the anti-TfR antibody of the present disclosure comprises a VL containing no more than 25 amino acid variations (e.g., no more than 25, 24, 23, 22, 21, 20, 19, 18, 17, 16, 15, 14, 13, 12, 11, 10, 9, 8, 7, 6, 5, 4, 3, 2, or 1 amino acid variation) as compared with the VL as set forth in SEQ ID NO: 78.

[0215] In some embodiments, the anti-TfR antibody of the present disclosure comprises a VH comprising an amino acid sequence that is at least 75% (e.g., 75%, 80%, 85%, 90%, 95%, 98%, or 99%) identical to the VH as set forth in SEQ ID NO: 77. Alternatively or in addition (e.g., in addition), the anti-TfR antibody of the present disclosure comprises a VL comprising an amino acid sequence that is at least 75% (e.g., 75%, 80%, 85%, 90%, 95%, 98%, or 99%) identical to the VL as set forth in SEQ ID NO: 78.

[0216] In some embodiments, the anti-TfR antibody of the present disclosure comprises a CDR-H1, a CDR-H2, and a CDR-H3 of a heavy chain variable domain having the amino acid sequence of SEQ ID NO: 85. Alternatively or in addition (e.g., in addition), the anti-TfR antibody of the present disclosure comprises a CDR-L1, a CDR-L2, and a CDR-L3 of a light chain variable domain having the amino acid sequence of SEQ ID NO: 86.

[0217] In some embodiments, the anti-TfR antibody of the present disclosure comprises a CDR-H1 having the amino acid sequence of SEQ ID NO: 79 (according to the IMGT definition system), a CDR-H2 having the amino acid sequence of SEQ ID NO: 80 (according to the IMGT definition system), a CDR-H3 having the amino acid sequence of SEQ ID NO: 81 (according to the IMGT definition system), a CDR-L1 having the amino acid sequence of SEQ ID NO: 82 (according to the IMGT definition system), a CDR-L2 having the amino acid sequence of SEQ ID NO: 83 (according to the IMGT definition system), and a CDR-L3 having the amino acid sequence of SEQ ID NO: 84 (according to the IMGT definition system).

[0218] In some embodiments, anti-TfR antibody of the present disclosure comprises a CDR-H1, a CDR-H2, and a CDR-H3, which collectively contains no more than 5 amino acid variations (e.g., no more than 5, 4, 3, 2, or 1 amino acid variation) as compared with the CDR-H1 having the amino acid sequence of SEQ ID NO: 79, CDR-H2 having the amino acid sequence of SEQ ID NO: 80, and CDR-H3 having the amino acid sequence of SEQ ID NO: 81. Alternatively or in addition (e.g., in addition), the anti-TfR antibody of the present disclosure comprises a CDR-L1, a CDR-L2, and a CDR-L3, which collectively contains no more than 5 amino acid variations (e.g., no more than 5, 4, 3, 2 or 1 amino acid variation) as compared with the CDR-L1 having the amino acid sequence of SEQ ID NO: 82, CDR-L2 having the amino acid sequence of SEQ ID NO: 83, and CDR-L3 having the amino acid sequence of SEQ ID NO: 84.

[0219] In some embodiments, the anti-TfR antibody of the present disclosure comprises a CDR-H1, a CDR-H2, and a CDR-H3 that collectively are at least 75% (e.g., 75%, 80%, 85%, 90%, 95%, 98%, or 99%) identical to the CDR-H1 having the amino acid sequence of SEQ ID NO: 79, CDR-H2 having the amino acid sequence of SEQ ID NO: 80, and CDR-H3 having the amino acid sequence of SEQ ID NO: 81. Alternatively or in addition (e.g., in addition), the anti-TfR antibody of the present disclosure comprises a CDR-L1, a CDR-L2, and a CDR-L3 that collectively are at least 75% (e.g., 75%, 80%, 85%, 90%, 95%, 98%, or 99%) identical to the to the CDR-L1 having the amino acid sequence of SEQ ID NO: 82, CDR-L2 having the amino acid sequence of SEQ ID NO: 83, and CDR-L3 having the amino acid sequence of SEQ ID NO: 84.

[0220] In some embodiments, the anti-TfR antibody of the present disclosure comprises: a CDR-H1 having no more than 3 amino acid variations (e.g., no more than 3, 2, or 1 amino acid variation) as compared with the CDR-H1 having the amino acid sequence of SEQ ID NO: 79; a CDR-H2 having no more than 3 amino acid variations (e.g., no more than 3, 2, or 1 amino acid variation) as compared with the CDR-H2 having the amino acid sequence of SEQ ID NO: 80; and/or (e.g., and) a CDR-H3 having no more than 3 amino acid variations (e.g., no more than 3, 2, or 1 amino acid variation) as compared with the CDR-H3 having the amino acid sequence of SEQ ID NO: 81. Alternatively or in addition (e.g., in addition), the anti-TfR antibody of the present disclosure comprises: a CDR-L1 having no more than 3 amino acid variations (e.g., no more than 3, 2, or 1 amino acid variation) as compared with the CDR-L1 having the amino acid sequence of SEQ ID NO: 82; a CDR-L2 having no more than 3 amino acid variations (e.g., no more than 3, 2, or 1 amino acid variation) as compared with the CDR-L2 having the amino acid sequence of SEQ ID NO: 83; and/or (e.g., and) a CDR-L3 having no more than 3 amino acid variations (e.g., no more than 3, 2, or 1 amino acid variation) as compared with the CDR-L3 having the amino acid sequence of SEQ ID NO: 84.

[0221] In some embodiments, the anti-TfR antibody of the present disclosure comprises a VH comprising the amino acid sequence of SEQ ID NO: 85. Alternatively or in addition (e.g., in addition), the anti-TfR antibody of the present disclosure comprises a VL comprising the amino acid sequence of SEQ ID NO: 86.

[0222] In some embodiments, the anti-TfR antibody of the present disclosure comprises a VH containing no more than 25 amino acid variations (e.g., no more than 25, 24, 23, 22, 21, 20, 19, 18, 17, 16, 15, 14, 13, 12, 11, 10, 9, 8, 7, 6, 5, 4, 3, 2, or 1 amino acid variation)no more than 25 amino acid variations (e.g., no more than 25, 24, 23, 22, 21, 20, 19, 18, 17, 16, 15, 14, 13, 12, 11, 10, 9, 8, 7, 6, 5, 4, 3, 2, or 1 amino acid variation) as compared with the VH as set forth in SEQ ID NO: 85. Alternatively or in addition (e.g., in addition), the anti-TfR antibody of the present disclosure comprises a VL containing no more than 25 amino acid variations (e.g., no more than 25, 24, 23, 22, 21, 20, 19, 18, 17, 16, 15, 14, 13, 12, 11, 10, 9, 8, 7, 6, 5, 4, 3, 2, or 1 amino acid variation) as compared with the VL as set forth in SEQ ID NO: 86.

[0223] In some embodiments, the anti-TfR antibody of the present disclosure comprises a VH comprising an amino acid sequence that is at least 75% (e.g., 75%, 80%, 85%, 90%, 95%, 98%, or 99%) identical to the VH as set forth in SEQ ID NO: 85. Alternatively or in addition (e.g., in addition), the anti-TfR antibody of the present disclosure comprises a VL comprising an amino acid sequence that is at least 75% (e.g., 75%, 80%, 85%, 90%, 95%, 98%, or 99%) identical to the VL as set forth in SEQ ID NO: 86.

[0224] In some embodiments, the anti-TfR antibody of the present disclosure comprises a CDR-H1, a CDR-H2, and a CDR-H3 of a heavy chain variable domain having the amino acid sequence of SEQ ID NO: 89. Alternatively or in addition (e.g., in addition), the anti-TfR antibody of the present disclosure comprises a CDR-L1, a CDR-L2, and a CDR-L3 of a light chain variable domain having the amino acid sequence of SEQ ID NO: 90.

[0225] In some embodiments, the anti-TfR antibody of the present disclosure comprises a CDR-H1 having the amino acid sequence of SEQ ID NO: 72 (according to the IMGT definition system), a CDR-H2 having the amino acid sequence of SEQ ID NO: 87 (according to the IMGT definition system), a CDR-H3 having the amino acid sequence of SEQ ID NO: 74 (according to the IMGT definition system), a CDR-L1 having the amino acid sequence of SEQ ID NO: 75 (according to the IMGT definition system), a CDR-L2 having the amino acid sequence of SEQ ID NO: 45 (according to the IMGT definition system), and a CDR-L3 having the amino acid sequence of SEQ ID NO: 88 (according to the IMGT definition system).

[0226] In some embodiments, anti-TfR antibody of the present disclosure comprises a CDR-H1, a CDR-H2, and a CDR-H3, which collectively contains no more than 5 amino acid variations (e.g., no more than 5, 4, 3, 2, or 1 amino acid variation) as compared with the CDR-H1 having the amino acid sequence of SEQ ID NO: 72, CDR-H2 having the amino acid sequence of SEQ ID NO: 87, and CDR-H3 having the amino acid sequence of SEQ ID NO: 74. Alternatively or in addition (e.g., in addition), the anti-TfR antibody of the present disclosure comprises a CDR-L1, a CDR-L2, and a CDR-L3, which collectively contains no more than 5 amino acid variations (e.g., no more than 5, 4, 3, 2 or 1 amino acid variation) as compared with the CDR-L1 having the amino acid sequence of SEQ ID NO: 75, CDR-L2 having the amino acid sequence of SEQ ID NO: 45, and CDR-L3 having the amino acid sequence of SEQ ID NO: 88.

[0227] In some embodiments, the anti-TfR antibody of the present disclosure comprises a CDR-H1, a CDR-H2, and a CDR-H3 that collectively are at least 75% (e.g., 75%, 80%, 85%, 90%, 95%, 98%, or 99%) identical to the CDR-H1 having the amino acid sequence of SEQ ID NO: 72, CDR-H2 having the amino acid sequence of SEQ ID NO: 87, and CDR-H3 having the amino acid sequence of SEQ ID NO: 74. Alternatively or in addition (e.g., in addition), the anti-TfR antibody of the present disclosure comprises a CDR-L1, a CDR-L2, and a CDR-L3 that collectively are at least 75% (e.g., 75%, 80%, 85%, 90%, 95%, 98%, or 99%) identical to the to the CDR-L1 having the amino acid sequence of SEQ ID NO: 75, CDR-L2 having the amino acid sequence of SEQ ID NO: 45, and CDR-L3 having the amino acid sequence of SEQ ID NO: 88.

[0228] In some embodiments, the anti-TfR antibody of the present disclosure comprises: a CDR-H1 having no more than 3 amino acid variations (e.g., no more than 3, 2, or 1 amino acid variation) as compared with the CDR-H1 having the amino acid sequence of SEQ ID NO: 72; a CDR-H2 having no more than 3 amino acid variations (e.g., no more than 3, 2, or 1 amino acid variation) as compared with the CDR-H2 having the amino acid sequence of SEQ ID NO: 87; and/or (e.g., and) a CDR-H3 having no more than 3 amino acid variations (e.g., no more than 3, 2, or 1 amino acid variation) as compared with the CDR-H3 having the amino acid sequence of SEQ ID NO: 74. Alternatively or in addition (e.g., in addition), the anti-TfR antibody of the present disclosure comprises: a CDR-L1 having no more than 3 amino acid variations (e.g., no more than 3, 2, or 1 amino acid variation) as compared with the CDR-L1 having the amino acid sequence of SEQ ID NO: 75; a CDR-L2 having no more than 3 amino acid variations (e.g., no more than 3, 2, or 1 amino acid variation) as compared with the CDR-L2 having the amino acid sequence of SEQ ID NO: 45; and/or (e.g., and) a CDR-L3 having no more than 3 amino acid variations (e.g., no more than 3, 2, or 1 amino acid variation) as compared with the CDR-L3 having the amino acid sequence of SEQ ID NO: 88.

[0229] In some embodiments, the anti-TfR antibody of the present disclosure comprises a VH comprising the amino acid sequence of SEQ ID NO: 89. Alternatively or in addition (e.g., in addition), the anti-TfR antibody of the present disclosure comprises a VL comprising the amino acid sequence of SEQ ID NO: 90.

[0230] In some embodiments, the anti-TfR antibody of the present disclosure comprises a VH containing no more than 25 amino acid variations (e.g., no more than 25, 24, 23, 22, 21, 20, 19, 18, 17, 16, 15, 14, 13, 12, 11, 10, 9, 8, 7, 6, 5, 4, 3, 2, or 1 amino acid variation)no more than 25 amino acid variations (e.g., no more than 25, 24, 23, 22, 21, 20, 19, 18, 17, 16, 15, 14, 13, 12, 11, 10, 9, 8, 7, 6, 5, 4, 3, 2, or 1 amino acid variation) as compared with the VH as set forth in SEQ ID NO: 89. Alternatively or in addition (e.g., in addition), the anti-TfR antibody of the present disclosure comprises a VL containing no more than 25 amino acid variations (e.g., no more than 25, 24, 23, 22, 21, 20, 19, 18, 17, 16, 15, 14, 13, 12, 11, 10, 9, 8, 7, 6, 5, 4, 3, 2, or 1 amino acid variation) as compared with the VL as set forth in SEQ ID NO: 90.

[0231] In some embodiments, the anti-TfR antibody of the present disclosure comprises a VH comprising an amino acid sequence that is at least 75% (e.g., 75%, 80%, 85%, 90%, 95%, 98%, or 99%) identical to the VH as set forth in SEQ ID NO: 89. Alternatively or in addition (e.g., in addition), the anti-TfR antibody of the present disclosure comprises a VL comprising an amino acid sequence that is at least 75% (e.g., 75%, 80%, 85%, 90%, 95%, 98%, or 99%) identical to the VL as set forth in SEQ ID NO: 90.

[0232] In some embodiments, the anti-TfR antibody of the present disclosure comprises a CDR-H1, a CDR-H2, and a CDR-H3 of a heavy chain variable domain having the amino acid sequence of SEQ ID NO: 97. Alternatively or in addition (e.g., in addition), the anti-TfR antibody of the present disclosure comprises a CDR-L1, a CDR-L2, and a CDR-L3 of a light chain variable domain having the amino acid sequence of SEQ ID NO: 98.

[0233] In some embodiments, the anti-TfR antibody of the present disclosure comprises a CDR-H1 having the amino acid sequence of SEQ ID NO: 91 (according to the IMGT definition system), a CDR-H2 having the amino acid sequence of SEQ ID NO: 92 (according to the IMGT definition system), a CDR-H3 having the amino acid sequence of SEQ ID NO: 93 (according to the IMGT definition system), a CDR-L1 having the amino acid sequence of SEQ ID NO: 94 (according to the IMGT definition system), a CDR-L2 having the amino acid sequence of SEQ ID NO: 95 (according to the IMGT definition system), and a CDR-L3 having the amino acid sequence of SEQ ID NO: 96 (according to the IMGT definition system).

[0234] In some embodiments, anti-TfR antibody of the present disclosure comprises a CDR-H1, a CDR-H2, and a CDR-H3, which collectively contains no more than 5 amino acid variations (e.g., no more than 5, 4, 3, 2, or 1 amino acid variation) as compared with the CDR-H1 having the amino acid sequence of SEQ ID NO: 91, CDR-H2 having the amino acid sequence of SEQ ID NO: 92, and CDR-H3 having the amino acid sequence of SEQ ID NO: 93. Alternatively or in addition (e.g., in addition), the anti-TfR antibody of the present disclosure comprises a CDR-L1, a CDR-L2, and a CDR-L3, which collectively contains no more than 5 amino acid variations (e.g., no more than 5, 4, 3, 2 or 1 amino acid variation) as compared with the CDR-L1 having the amino acid sequence of SEQ ID NO: 94, CDR-L2 having the amino acid sequence of SEQ ID NO: 95, and CDR-L3 having the amino acid sequence of SEQ ID NO: 96.

[0235] In some embodiments, the anti-TfR antibody of the present disclosure comprises a CDR-H1, a CDR-H2, and a CDR-H3 that collectively are at least 75% (e.g., 75%, 80%, 85%, 90%, 95%, 98%, or 99%) identical to the CDR-H1 having the amino acid sequence of SEQ ID NO: 91, CDR-H2 having the amino acid sequence of SEQ ID NO: 92, and CDR-H3 having the amino acid sequence of SEQ ID NO: 93. Alternatively or in addition (e.g., in addition), the anti-TfR antibody of the present disclosure comprises a CDR-L1, a CDR-L2, and a CDR-L3 that collectively are at least 75% (e.g., 75%, 80%, 85%, 90%, 95%, 98%, or 99%) identical to the to the CDR-L1 having the amino acid sequence of SEQ ID NO: 94, CDR-L2 having the amino acid sequence of SEQ ID NO: 95, and CDR-L3 having the amino acid sequence of SEQ ID NO: 96.

[0236] In some embodiments, the anti-TfR antibody of the present disclosure comprises: a CDR-H1 having no more than 3 amino acid variations (e.g., no more than 3, 2, or 1 amino acid variation) as compared with the CDR-H1 having the amino acid sequence of SEQ ID NO: 91; a CDR-H2 having no more than 3 amino acid variations (e.g., no more than 3, 2, or 1 amino acid variation) as compared with the CDR-H2 having the amino acid sequence of SEQ ID NO: 92; and/or (e.g., and) a CDR-H3 having no more than 3 amino acid variations (e.g., no more than 3, 2, or 1 amino acid variation) as compared with the CDR-H3 having the amino acid sequence of SEQ ID NO: 93. Alternatively or in addition (e.g., in addition), the anti-TfR antibody of the present disclosure comprises: a CDR-L1 having no more than 3 amino acid variations (e.g., no more than 3, 2, or 1 amino acid variation) as compared with the CDR-L1 having the amino acid sequence of SEQ ID NO: 94; a CDR-L2 having no more than 3 amino acid variations (e.g., no more than 3, 2, or 1 amino acid variation) as compared with the CDR-L2 having the amino acid sequence of SEQ ID NO: 95; and/or (e.g., and) a CDR-L3 having no more than 3 amino acid variations (e.g., no more than 3, 2, or 1 amino acid variation) as compared with the CDR-L3 having the amino acid sequence of SEQ ID NO: 96.

[0237] In some embodiments, the anti-TfR antibody of the present disclosure comprises a VH comprising the amino acid sequence of SEQ ID NO: 97. Alternatively or in addition (e.g., in addition), the anti-TfR antibody of the present disclosure comprises a VL comprising the amino acid sequence of SEQ ID NO: 98.

[0238] In some embodiments, the anti-TfR antibody of the present disclosure comprises a VH containing no more than 25 amino acid variations (e.g., no more than 25, 24, 23, 22, 21, 20, 19, 18, 17, 16, 15, 14, 13, 12, 11, 10, 9, 8, 7, 6, 5, 4, 3, 2, or 1 amino acid variation) as compared with the VH as set forth in SEQ ID NO: 97. Alternatively or in addition (e.g., in addition), the anti-TfR antibody of the present disclosure comprises a VL containing no more than 25 amino acid variations (e.g., no more than 25, 24, 23, 22, 21, 20, 19, 18, 17, 16, 15, 14, 13, 12, 11, 10, 9, 8, 7, 6, 5, 4, 3, 2, or 1 amino acid variation) as compared with the VL as set forth in SEQ ID NO: 98.

[0239] In some embodiments, the anti-TfR antibody of the present disclosure comprises a VH comprising an amino acid sequence that is at least 75% (e.g., 75%, 80%, 85%, 90%, 95%, 98%, or 99%) identical to the VH as set forth in SEQ ID NO: 97. Alternatively or in addition (e.g., in addition), the anti-TfR antibody of the present disclosure comprises a VL comprising an amino acid sequence that is at least 75% (e.g., 75%, 80%, 85%, 90%, 95%, 98%, or 99%) identical to the VL as set forth in SEQ ID NO: 98.

[0240] In some embodiments, the anti-TfR antibody of the present disclosure comprises a CDR-H1, a CDR-H2, and a CDR-H3 of a heavy chain variable domain having the amino acid sequence of SEQ ID NO: 104. Alternatively or in addition (e.g., in addition), the anti-TfR antibody of the present disclosure comprises a CDR-L1, a CDR-L2, and a CDR-L3 of a light chain variable domain having the amino acid sequence of SEQ ID NO: 105.

[0241] In some embodiments, anti-TfR antibody of the present disclosure comprises a CDR-H1, a CDR-H2, and a CDR-H3, which collectively contains no more than 5 amino acid variation (e.g., no more than 5, 4, 3, 2, or 1 amino acid variation) as compared with the CDR-H1 having the amino acid sequence of SEQ ID NO: 99, CDR-H2 having the amino acid sequence of SEQ ID NO: 100, and CDR-H3 having the amino acid sequence of SEQ ID NO: 101. Alternatively or in addition (e.g., in addition), the anti-TfR antibody of the present disclosure comprises a CDR-L1, a CDR-L2, and a CDR-L3, which collectively contains no more than 5 amino acid variations (e.g., no more than 5, 4, 3, 2 or 1 amino acid variation) as compared with the CDR-L1 having the amino acid sequence of SEQ ID NO: 102, CDR-L2 having the amino acid sequence of SEQ ID NO: 60, and CDR-L3 having the amino acid sequence of SEQ ID NO: 103.

[0242] In some embodiments, the anti-TfR antibody of the present disclosure comprises a CDR-H1, a CDR-H2, and a CDR-H3 that collectively are at least 75% (e.g., 75%, 80%, 85%, 90%, 95%, 98%, or 99%) identical to the CDR-H1 having the amino acid sequence of SEQ ID NO: 99, CDR-H2 having the amino acid sequence of SEQ ID NO: 100, and CDR-H3 having the amino acid sequence of SEQ ID NO: 101. Alternatively or in addition (e.g., in addition), the anti-TfR antibody of the present disclosure comprises a CDR-L1, a CDR-L2, and a CDR-L3 that collectively are at least 75% (e.g., 75%, 80%, 85%, 90%, 95%, 98%, or 99%) identical to the to the CDR-L1 having the amino acid sequence of SEQ ID NO: 102, CDR-L2 having the amino acid sequence of SEQ ID NO: 60, and CDR-L3 having the amino acid sequence of SEQ ID NO: 103.

[0243] In some embodiments, the anti-TfR antibody of the present disclosure comprises: a CDR-H1 having no more than 3 amino acid variations (e.g., no more than 3, 2, or 1 amino acid variation) as compared with the CDR-H1 having the amino acid sequence of SEQ ID NO: 99; a CDR-H2 having no more than 3 amino acid variations (e.g., no more than 3, 2, or 1 amino acid variation) as compared with the CDR-H2 having the amino acid sequence of SEQ ID NO: 100; and/or (e.g., and) a CDR-H3 having no more than 3 amino acid variations (e.g., no more than 3, 2, or 1 amino acid variation) as compared with the CDR-H3 having the amino acid sequence of SEQ ID NO: 101. Alternatively or in addition (e.g., in addition), the anti-TfR antibody of the present disclosure comprises: a CDR-L1 having no more than 3 amino acid variations (e.g., no more than 3, 2, or 1 amino acid variation) as compared with the CDR-L1 having the amino acid sequence of SEQ ID NO: 102; a CDR-L2 having no more than 3 amino acid variations (e.g., no more than 3, 2, or 1 amino acid variation) as compared with the CDR-L2 having the amino acid sequence of SEQ ID NO: 60; and/or (e.g., and) a CDR-L3 having no more than 3 amino acid variations (e.g., no more than 3, 2, or 1 amino acid variation) as compared with the CDR-L3 having the amino acid sequence of SEQ ID NO: 103.

[0244] In some embodiments, the anti-TfR antibody of the present disclosure comprises a VH comprising the amino acid sequence of SEQ ID NO: 104. Alternatively or in addition (e.g., in addition), the anti-TfR antibody of the present disclosure comprises a VL comprising the amino acid sequence of SEQ ID NO: 105.

[0245] In some embodiments, the anti-TfR antibody of the present disclosure comprises a VH containing no more than 25 amino acid variations (e.g., no more than 25, 24, 23, 22, 21, 20, 19, 18, 17, 16, 15, 14, 13, 12, 11, 10, 9, 8, 7, 6, 5, 4, 3, 2, or 1 amino acid variation) as compared with the VH as set forth in SEQ ID NO: 104. Alternatively or in addition (e.g., in addition), the anti-TfR antibody of the present disclosure comprises a VL containing no more than 25 amino acid variations (e.g., no more than 25, 24, 23, 22, 21, 20, 19, 18, 17, 16, 15, 14, 13, 12, 11, 10, 9, 8, 7, 6, 5, 4, 3, 2, or 1 amino acid variation) as compared with the VL as set forth in SEQ ID NO: 105.

[0246] In some embodiments, the anti-TfR antibody of the present disclosure comprises a VH comprising an amino acid sequence that is at least 75% (e.g., 75%, 80%, 85%, 90%, 95%, 98%, or 99%) identical to the VH as set forth in SEQ ID NO: 104. Alternatively or in addition (e.g., in addition), the anti-TfR antibody of the present disclosure comprises a VL comprising an amino acid sequence that is at least 75% (e.g., 75%, 80%, 85%, 90%, 95%, 98%, or 99%) identical to the VL as set forth in SEQ ID NO: 105.

[0247] In some embodiments, the anti-TfR antibody of the present disclosure comprises a CDR-H1, a CDR-H2, and a CDR-H3 of a heavy chain variable domain having the amino acid sequence of SEQ ID NO: 112. Alternatively or in addition (e.g., in addition), the anti-TfR antibody of the present disclosure comprises a CDR-L1, a CDR-L2, and a CDR-L3 of a light chain variable domain having the amino acid sequence of SEQ ID NO: 113.

[0248] In some embodiments, the anti-TfR antibody of the present disclosure comprises a CDR-H1 having the amino acid sequence of SEQ ID NO: 106 (according to the IMGT definition system), a CDR-H2 having the amino acid sequence of SEQ ID NO: 107 (according to the IMGT definition system), a CDR-H3 having the amino acid sequence of SEQ ID NO: 108 (according to the IMGT definition system), a CDR-L1 having the amino acid sequence of SEQ ID NO: 109 (according to the IMGT definition system), a CDR-L2 having the amino acid sequence of SEQ ID NO: 110 (according to the IMGT definition system), and a CDR-L3 having the amino acid sequence of SEQ ID NO: 111 (according to the IMGT definition system).

[0249] In some embodiments, anti-TfR antibody of the present disclosure comprises a CDR-H1, a CDR-H2, and a CDR-H3, which collectively contains no more than 5 amino acid variation (e.g., no more than 5, 4, 3, 2, or 1 amino acid variation) as compared with the CDR-H1 having the amino acid sequence of SEQ ID NO: 106, CDR-H2 having the amino acid sequence of SEQ ID NO: 107, and CDR-H3 having the amino acid sequence of SEQ ID NO: 108. Alternatively or in addition (e.g., in addition), the anti-TfR antibody of the present disclosure comprises a CDR-L1, a CDR-L2, and a CDR-L3, which collectively contains no more than 5 amino acid variations (e.g., no more than 5, 4, 3, 2 or 1 amino acid variation) as compared with the CDR-L1 having the amino acid sequence of SEQ ID NO: 109, CDR-L2 having the amino acid sequence of SEQ ID NO: 110, and CDR-L3 having the amino acid sequence of SEQ ID NO: 111.

[0250] In some embodiments, the anti-TfR antibody of the present disclosure comprises a CDR-H1, a CDR-H2, and a CDR-H3 that collectively are at least 75% (e.g., 75%, 80%, 85%, 90%, 95%, 98%, or 99%) identical to the CDR-H1 having the amino acid sequence of SEQ ID NO: 106, CDR-H2 having the amino acid sequence of SEQ ID NO: 107, and CDR-H3 having the amino acid sequence of SEQ ID NO: 108. Alternatively or in addition (e.g., in addition), the anti-TfR antibody of the present disclosure comprises a CDR-L1, a CDR-L2, and a CDR-L3 that collectively are at least 75% (e.g., 75%, 80%, 85%, 90%, 95%, 98%, or 99%) identical to the to the CDR-L1 having the amino acid sequence of SEQ ID NO: 109, CDR-L2 having the amino acid sequence of SEQ ID NO: 110, and CDR-L3 having the amino acid sequence of SEQ ID NO: 111.

[0251] In some embodiments, the anti-TfR antibody of the present disclosure comprises: a CDR-H1 having no more than 3 amino acid variations (e.g., no more than 3, 2, or 1 amino acid variation) as compared with the CDR-H1 having the amino acid sequence of SEQ ID NO: 106; a CDR-H2 having no more than 3 amino acid variations (e.g., no more than 3, 2, or 1 amino acid variation) as compared with the CDR-H2 having the amino acid sequence of SEQ ID NO: 107; and/or (e.g., and) a CDR-H3 having no more than 3 amino acid variations (e.g., no more than 3, 2, or 1 amino acid variation) as compared with the CDR-H3 having the amino acid sequence of SEQ ID NO: 108. Alternatively or in addition (e.g., in addition), the anti-TfR antibody of the present disclosure comprises: a CDR-L1 having no more than 3 amino acid variations (e.g., no more than 3, 2, or 1 amino acid variation) as compared with the CDR-L1 having the amino acid sequence of SEQ ID NO: 109; a CDR-L2 having no more than 3 amino acid variations (e.g., no more than 3, 2, or 1 amino acid variation) as compared with the CDR-L2 having the amino acid sequence of SEQ ID NO: 110; and/or (e.g., and) a CDR-L3 having no more than 3 amino acid variations (e.g., no more than 3, 2, or 1 amino acid variation) as compared with the CDR-L3 having the amino acid sequence of SEQ ID NO: 111.

[0252] In some embodiments, the anti-TfR antibody of the present disclosure comprises a VH comprising the amino acid sequence of SEQ ID NO: 112. Alternatively or in addition (e.g., in addition), the anti-TfR antibody of the present disclosure comprises a VL comprising the amino acid sequence of SEQ ID NO: 113.

[0253] In some embodiments, the anti-TfR antibody of the present disclosure comprises a VH containing no more than 25 amino acid variations (e.g., no more than 25, 24, 23, 22, 21, 20, 19, 18, 17, 16, 15, 14, 13, 12, 11, 10, 9, 8, 7, 6, 5, 4, 3, 2, or 1 amino acid variation) as compared with the VH as set forth in SEQ ID NO: 112. Alternatively or in addition (e.g., in addition), the anti-TfR antibody of the present disclosure comprises a VL containing no more than 25 amino acid variations (e.g., no more than 25, 24, 23, 22, 21, 20, 19, 18, 17, 16, 15, 14, 13, 12, 11, 10, 9, 8, 7, 6, 5, 4, 3, 2, or 1 amino acid variation) as compared with the VL as set forth in SEQ ID NO: 113.

[0254] In some embodiments, the anti-TfR antibody of the present disclosure comprises a VH comprising an amino acid sequence that is at least 75% (e.g., 75%, 80%, 85%, 90%, 95%, 98%, or 99%) identical to the VH as set forth in SEQ ID NO: 112. Alternatively or in addition (e.g., in addition), the anti-TfR antibody of the present disclosure comprises a VL comprising an amino acid sequence that is at least 75% (e.g., 75%, 80%, 85%, 90%, 95%, 98%, or 99%) identical to the VL as set forth in SEQ ID NO: 113.

[0255] In some embodiments, the anti-TfR antibody of the present disclosure comprises a CDR-H1, a CDR-H2, and a CDR-H3 of a heavy chain variable domain having the amino acid sequence of SEQ ID NO: 117. Alternatively or in addition (e.g., in addition), the anti-TfR antibody of the present disclosure comprises a CDR-L1, a CDR-L2, and a CDR-L3 of a light chain variable domain having the amino acid sequence of SEQ ID NO: 118.

[0256] In some embodiments, the anti-TfR antibody of the present disclosure comprises a CDR-H1 having the amino acid sequence of SEQ ID NO: 79 (according to the IMGT definition system), a CDR-H2 having the amino acid sequence of SEQ ID NO: 114 (according to the IMGT definition system), a CDR-H3 having the amino acid sequence of SEQ ID NO: 115 (according to the IMGT definition system), a CDR-L1 having the amino acid sequence of SEQ ID NO: 82 (according to the IMGT definition system), a CDR-L2 having the amino acid sequence of SEQ ID NO: 83 (according to the IMGT definition system), and a CDR-L3 having the amino acid sequence of SEQ ID NO: 116 (according to the IMGT definition system).

[0257] In some embodiments, anti-TfR antibody of the present disclosure comprises a CDR-H1, a CDR-H2, and a CDR-H3, which collectively contains no more than 5 amino acid variation (e.g., no more than 5, 4, 3, 2, or 1 amino acid variation) as compared with the CDR-H1 having the amino acid sequence of SEQ ID NO: 79, CDR-H2 having the amino acid sequence of SEQ ID NO: 114, and CDR-H3 having the amino acid sequence of SEQ ID NO: 115. Alternatively or in addition (e.g., in addition), the anti-TfR antibody of the present disclosure comprises a CDR-L1, a CDR-L2, and a CDR-L3, which collectively contains no more than 5 amino acid variations (e.g., no more than 5, 4, 3, 2 or 1 amino acid variation) as compared with the CDR-L1 having the amino acid sequence of SEQ ID NO: 82, CDR-L2 having the amino acid sequence of SEQ ID NO: 83, and CDR-L3 having the amino acid sequence of SEQ ID NO: 116.

[0258] In some embodiments, the anti-TfR antibody of the present disclosure comprises a CDR-H1, a CDR-H2, and a CDR-H3 that collectively are at least 75% (e.g., 75%, 80%, 85%, 90%, 95%, 98%, or 99%) identical to the CDR-H1 having the amino acid sequence of SEQ ID NO: 79, CDR-H2 having the amino acid sequence of SEQ ID NO: 114, and CDR-H3 having the amino acid sequence of SEQ ID NO: 115. Alternatively or in addition (e.g., in addition), the anti-TfR antibody of the present disclosure comprises a CDR-L1, a CDR-L2, and a CDR-L3 that collectively are at least 75% (e.g., 75%, 80%, 85%, 90%, 95%, 98%, or 99%) identical to the to the CDR-L1 having the amino acid sequence of SEQ ID NO: 82, CDR-L2 having the amino acid sequence of SEQ ID NO: 83, and CDR-L3 having the amino acid sequence of SEQ ID NO: 116.

[0259] In some embodiments, the anti-TfR antibody of the present disclosure comprises: a CDR-H1 having no more than 3 amino acid variations (e.g., no more than 3, 2, or 1 amino acid variation) as compared with the CDR-H1 having the amino acid sequence of SEQ ID NO: 79; a CDR-H2 having no more than 3 amino acid variations (e.g., no more than 3, 2, or 1 amino acid variation) as compared with the CDR-H2 having the amino acid sequence of SEQ ID NO: 114; and/or (e.g., and) a CDR-H3 having no more than 3 amino acid variations (e.g., no more than 3, 2, or 1 amino acid variation) as compared with the CDR-H3 having the amino acid sequence of SEQ ID NO: 115. Alternatively or in addition (e.g., in addition), the anti-TfR antibody of the present disclosure comprises: a CDR-L1 having no more than 3 amino acid variations (e.g., no more than 3, 2, or 1 amino acid variation) as compared with the CDR-L1 having the amino acid sequence of SEQ ID NO: 82; a CDR-L2 having no more than 3 amino acid variations (e.g., no more than 3, 2, or 1 amino acid variation) as compared with the CDR-L2 having the amino acid sequence of SEQ ID NO: 83; and/or (e.g., and) a CDR-L3 having no more than 3 amino acid variations (e.g., no more than 3, 2, or 1 amino acid variation) as compared with the CDR-L3 having the amino acid sequence of SEQ ID NO: 116.

[0260] In some embodiments, the anti-TfR antibody of the present disclosure comprises a VH comprising the amino acid sequence of SEQ ID NO: 117. Alternatively or in addition (e.g., in addition), the anti-TfR antibody of the present disclosure comprises a VL comprising the amino acid sequence of SEQ ID NO: 118.

[0261] In some embodiments, the anti-TfR antibody of the present disclosure comprises a VH containing no more than 25 amino acid variations (e.g., no more than 25, 24, 23, 22, 21, 20, 19, 18, 17, 16, 15, 14, 13, 12, 11, 10, 9, 8, 7, 6, 5, 4, 3, 2, or 1 amino acid variation) as compared with the VH as set forth in SEQ ID NO: 117. Alternatively or in addition (e.g., in addition), the anti-TfR antibody of the present disclosure comprises a VL containing no more than 25 amino acid variations (e.g., no more than 25, 24, 23, 22, 21, 20, 19, 18, 17, 16, 15, 14, 13, 12, 11, 10, 9, 8, 7, 6, 5, 4, 3, 2, or 1 amino acid variation) as compared with the VL as set forth in SEQ ID NO: 118.

[0262] In some embodiments, the anti-TfR antibody of the present disclosure comprises a VH comprising an amino acid sequence that is at least 75% (e.g., 75%, 80%, 85%, 90%, 95%, 98%, or 99%) identical to the VH as set forth in SEQ ID NO: 117. Alternatively or in addition (e.g., in addition), the anti-TfR antibody of the present disclosure comprises a VL comprising an amino acid sequence that is at least 75% (e.g., 75%, 80%, 85%, 90%, 95%, 98%, or 99%) identical to the VL as set forth in SEQ ID NO: 118.

[0263] In some embodiments, the anti-TfR antibody of the present disclosure comprises a CDR-H1, a CDR-H2, and a CDR-H3 of a heavy chain variable domain having the amino acid sequence of SEQ ID NO: 124. Alternatively or in addition (e.g., in addition), the anti-TfR antibody of the present disclosure comprises a CDR-L1, a CDR-L2, and a CDR-L3 of a light chain variable domain having the amino acid sequence of SEQ ID NO: 125.

[0264] In some embodiments, the anti-TfR antibody of the present disclosure comprises a CDR-H1 having the amino acid sequence of SEQ ID NO: 119 (according to the IMGT definition system), a CDR-H2 having the amino acid sequence of SEQ ID NO: 120 (according to the IMGT definition system), a CDR-H3 having the amino acid sequence of SEQ ID NO: 121 (according to the IMGT definition system), a CDR-L1 having the amino acid sequence of SEQ ID NO: 122 (according to the IMGT definition system), a CDR-L2 having the amino acid sequence of SEQ ID NO: 45 (according to the IMGT definition system), and a CDR-L3 having the amino acid sequence of SEQ ID NO: 123 (according to the IMGT definition system).

[0265] In some embodiments, anti-TfR antibody of the present disclosure comprises a CDR-H1, a CDR-H2, and a CDR-H3, which collectively contains no more than 5 amino acid variation (e.g., no more than 5, 4, 3, 2, or 1 amino acid variation) as compared with the CDR-H1 having the amino acid sequence of SEQ ID NO: 119, CDR-H2 having the amino acid sequence of SEQ ID NO: 120, and CDR-H3 having the amino acid sequence of SEQ ID NO: 121. Alternatively or in addition (e.g., in addition), the anti-TfR antibody of the present disclosure comprises a CDR-L1, a CDR-L2, and a CDR-L3, which collectively contains no more than 5 amino acid variations (e.g., no more than 5, 4, 3, 2 or 1 amino acid variation) as compared with the CDR-L1 having the amino acid sequence of SEQ ID NO: 122, CDR-L2 having the amino acid sequence of SEQ ID NO: 45, and CDR-L3 having the amino acid sequence of SEQ ID NO: 123.

[0266] In some embodiments, the anti-TfR antibody of the present disclosure comprises a CDR-H1, a CDR-H2, and a CDR-H3 that collectively are at least 75% (e.g., 75%, 80%, 85%, 90%, 95%, 98%, or 99%) identical to the CDR-H1 having the amino acid sequence of SEQ ID NO: 119, CDR-H2 having the amino acid sequence of SEQ ID NO: 120, and CDR-H3 having the amino acid sequence of SEQ ID NO: 121. Alternatively or in addition (e.g., in addition), the anti-TfR antibody of the present disclosure comprises a CDR-L1, a CDR-L2, and a CDR-L3 that collectively are at least 75% (e.g., 75%, 80%, 85%, 90%, 95%, 98%, or 99%) identical to the to the CDR-L1 having the amino acid sequence of SEQ ID NO: 122, CDR-L2 having the amino acid sequence of SEQ ID NO: 45, and CDR-L3 having the amino acid sequence of SEQ ID NO: 123.

[0267] In some embodiments, the anti-TfR antibody of the present disclosure comprises: a CDR-H1 having no more than 3 amino acid variations (e.g., no more than 3, 2, or 1 amino acid variation) as compared with the CDR-H1 having the amino acid sequence of SEQ ID NO: 119; a CDR-H2 having no more than 3 amino acid variations (e.g., no more than 3, 2, or 1 amino acid variation) as compared with the CDR-H2 having the amino acid sequence of SEQ ID NO: 120; and/or (e.g., and) a CDR-H3 having no more than 3 amino acid variations (e.g., no more than 3, 2, or 1 amino acid variation) as compared with the CDR-H3 having the amino acid sequence of SEQ ID NO: 121. Alternatively or in addition (e.g., in addition), the anti-TfR antibody of the present disclosure comprises: a CDR-L1 having no more than 3 amino acid variations (e.g., no more than 3, 2, or 1 amino acid variation) as compared with the CDR-L1 having the amino acid sequence of SEQ ID NO: 122; a CDR-L2 having no more than 3 amino acid variations (e.g., no more than 3, 2, or 1 amino acid variation) as compared with the CDR-L2 having the amino acid sequence of SEQ ID NO: 45; and/or (e.g., and) a CDR-L3 having no more than 3 amino acid variations (e.g., no more than 3, 2, or 1 amino acid variation) as compared with the CDR-L3 having the amino acid sequence of SEQ ID NO: 123.

[0268] In some embodiments, the anti-TfR antibody of the present disclosure comprises a VH comprising the amino acid sequence of SEQ ID NO: 124. Alternatively or in addition (e.g., in addition), the anti-TfR antibody of the present disclosure comprises a VL comprising the amino acid sequence of SEQ ID NO: 125.

[0269] In some embodiments, the anti-TfR antibody of the present disclosure comprises a VH containing no more than 25 amino acid variations (e.g., no more than 25, 24, 23, 22, 21, 20, 19, 18, 17, 16, 15, 14, 13, 12, 11, 10, 9, 8, 7, 6, 5, 4, 3, 2, or 1 amino acid variation) as compared with the VH as set forth in SEQ ID NO: 124. Alternatively or in addition (e.g., in addition), the anti-TfR antibody of the present disclosure comprises a VL containing no more than 25 amino acid variations (e.g., no more than 25, 24, 23, 22, 21, 20, 19, 18, 17, 16, 15, 14, 13, 12, 11, 10, 9, 8, 7, 6, 5, 4, 3, 2, or 1 amino acid variation) as compared with the VL as set forth in SEQ ID NO: 125.

[0270] In some embodiments, the anti-TfR antibody of the present disclosure comprises a VH comprising an amino acid sequence that is at least 75% (e.g., 75%, 80%, 85%, 90%, 95%, 98%, or 99%) identical to the VH as set forth in SEQ ID NO: 124. Alternatively or in addition (e.g., in addition), the anti-TfR antibody of the present disclosure comprises a VL comprising an amino acid sequence that is at least 75% (e.g., 75%, 80%, 85%, 90%, 95%, 98%, or 99%) identical to the VL as set forth in SEQ ID NO: 125.

[0271] In some embodiments, the anti-TfR antibody of the present disclosure comprises a CDR-H1, a CDR-H2, and a CDR-H3 of a heavy chain variable domain having the amino acid sequence of SEQ ID NO: 132. Alternatively or in addition (e.g., in addition), the anti-TfR antibody of the present disclosure comprises a CDR-L1, a CDR-L2, and a CDR-L3 of a light chain variable domain having the amino acid sequence of SEQ ID NO: 133.

[0272] In some embodiments, the anti-TfR antibody of the present disclosure comprises a CDR-H1 having the amino acid sequence of SEQ ID NO: 126 (according to the IMGT definition system), a CDR-H2 having the amino acid sequence of SEQ ID NO: 127 (according to the IMGT definition system), a CDR-H3 having the amino acid sequence of SEQ ID NO: 128 (according to the IMGT definition system), a CDR-L1 having the amino acid sequence of SEQ ID NO: 129 (according to the IMGT definition system), a CDR-L2 having the amino acid sequence of SEQ ID NO: 130 (according to the IMGT definition system), and a CDR-L3 having the amino acid sequence of SEQ ID NO: 131 (according to the IMGT definition system).

[0273] In some embodiments, anti-TfR antibody of the present disclosure comprises a CDR-H1, a CDR-H2, and a CDR-H3, which collectively contains no more than 5 amino acid variation (e.g., no more than 5, 4, 3, 2, or 1 amino acid variation) as compared with the CDR-H1 having the amino acid sequence of SEQ ID NO: 126, CDR-H2 having the amino acid sequence of SEQ ID NO: 127, and CDR-H3 having the amino acid sequence of SEQ ID NO: 128. Alternatively or in addition (e.g., in addition), the anti-TfR antibody of the present disclosure comprises a CDR-L1, a CDR-L2, and a CDR-L3, which collectively contains no more than 5 amino acid variations (e.g., no more than 5, 4, 3, 2 or 1 amino acid variation) as compared with the CDR-L1 having the amino acid sequence of SEQ ID NO: 129, CDR-L2 having the amino acid sequence of SEQ ID NO: 130, and CDR-L3 having the amino acid sequence of SEQ ID NO: 131.

[0274] In some embodiments, the anti-TfR antibody of the present disclosure comprises a CDR-H1, a CDR-H2, and a CDR-H3 that collectively are at least 75% (e.g., 75%, 80%, 85%, 90%, 95%, 98%, or 99%) identical to the CDR-H1 having the amino acid sequence of SEQ ID NO: 126, CDR-H2 having the amino acid sequence of SEQ ID NO: 127, and CDR-H3 having the amino acid sequence of SEQ ID NO: 128. Alternatively or in addition (e.g., in addition), the anti-TfR antibody of the present disclosure comprises a CDR-L1, a CDR-L2, and a CDR-L3 that collectively are at least 75% (e.g., 75%, 80%, 85%, 90%, 95%, 98%, or 99%) identical to the to the CDR-L1 having the amino acid sequence of SEQ ID NO: 129, CDR-L2 having the amino acid sequence of SEQ ID NO: 130, and CDR-L3 having the amino acid sequence of SEQ ID NO: 131.

[0275] In some embodiments, the anti-TfR antibody of the present disclosure comprises: a CDR-H1 having no more than 3 amino acid variations (e.g., no more than 3, 2, or 1 amino acid variation) as compared with the CDR-H1 having the amino acid sequence of SEQ ID NO: 126; a CDR-H2 having no more than 3 amino acid variations (e.g., no more than 3, 2, or 1 amino acid variation) as compared with the CDR-H2 having the amino acid sequence of SEQ ID NO: 127; and/or (e.g., and) a CDR-H3 having no more than 3 amino acid variations (e.g., no more than 3, 2, or 1 amino acid variation) as compared with the CDR-H3 having the amino acid sequence of SEQ ID NO: 128. Alternatively or in addition (e.g., in addition), the anti-TfR antibody of the present disclosure comprises: a CDR-L1 having no more than 3 amino acid variations (e.g., no more than 3, 2, or 1 amino acid variation) as compared with the CDR-L1 having the amino acid sequence of SEQ ID NO: 129; a CDR-L2 having no more than 3 amino acid variations (e.g., no more than 3, 2, or 1 amino acid variation) as compared with the CDR-L2 having the amino acid sequence of SEQ ID NO: 130; and/or (e.g., and) a CDR-L3 having no more than 3 amino acid variations (e.g., no more than 3, 2, or 1 amino acid variation) as compared with the CDR-L3 having the amino acid sequence of SEQ ID NO: 131.

[0276] In some embodiments, the anti-TfR antibody of the present disclosure comprises a VH comprising the amino acid sequence of SEQ ID NO: 132. Alternatively or in addition (e.g., in addition), the anti-TfR antibody of the present disclosure comprises a VL comprising the amino acid sequence of SEQ ID NO: 133.

[0277] In some embodiments, the anti-TfR antibody of the present disclosure comprises a VH containing no more than 25 amino acid variations (e.g., no more than 25, 24, 23, 22, 21, 20, 19, 18, 17, 16, 15, 14, 13, 12, 11, 10, 9, 8, 7, 6, 5, 4, 3, 2, or 1 amino acid variation) as compared with the VH as set forth in SEQ ID NO: 132. Alternatively or in addition (e.g., in addition), the anti-TfR antibody of the present disclosure comprises a VL containing no more than 25 amino acid variations (e.g., no more than 25, 24, 23, 22, 21, 20, 19, 18, 17, 16, 15, 14, 13, 12, 11, 10, 9, 8, 7, 6, 5, 4, 3, 2, or 1 amino acid variation) as compared with the VL as set forth in SEQ ID NO: 133.

[0278] In some embodiments, the anti-TfR antibody of the present disclosure comprises a VH comprising an amino acid sequence that is at least 75% (e.g., 75%, 80%, 85%, 90%, 95%, 98%, or 99%) identical to the VH as set forth in SEQ ID NO: 132. Alternatively or in addition (e.g., in addition), the anti-TfR antibody of the present disclosure comprises a VL comprising an amino acid sequence that is at least 75% (e.g., 75%, 80%, 85%, 90%, 95%, 98%, or 99%) identical to the VL as set forth in SEQ ID NO: 133.

[0279] In some embodiments, the anti-TfR antibody of the present disclosure comprises a CDR-H1, a CDR-H2, and a CDR-H3 of a heavy chain variable domain having the amino acid sequence of SEQ ID NO: 136. Alternatively or in addition (e.g., in addition), the anti-TfR antibody of the present disclosure comprises a CDR-L1, a CDR-L2, and a CDR-L3 of a light chain variable domain having the amino acid sequence of SEQ ID NO: 137.

[0280] In some embodiments, the anti-TfR antibody of the present disclosure comprises a CDR-H1 having the amino acid sequence of SEQ ID NO: 79 (according to the IMGT definition system), a CDR-H2 having the amino acid sequence of SEQ ID NO: 2 (according to the IMGT definition system), a CDR-H3 having the amino acid sequence of SEQ ID NO: 134 (according to the IMGT definition system), a CDR-L1 having the amino acid sequence of SEQ ID NO: 75 (according to the IMGT definition system), a CDR-L2 having the amino acid sequence of SEQ ID NO: 45 (according to the IMGT definition system), and a CDR-L3 having the amino acid sequence of SEQ ID NO: 135 (according to the IMGT definition system).

[0281] In some embodiments, anti-TfR antibody of the present disclosure comprises a CDR-H1, a CDR-H2, and a CDR-H3, which collectively contains no more than 5 amino acid variation (e.g., no more than 5, 4, 3, 2, or 1 amino acid variation) as compared with the CDR-H1 having the amino acid sequence of SEQ ID NO: 79, CDR-H2 having the amino acid sequence of SEQ ID NO: 2, and CDR-H3 having the amino acid sequence of SEQ ID NO: 134. Alternatively or in addition (e.g., in addition), the anti-TfR antibody of the present disclosure comprises a CDR-L1, a CDR-L2, and a CDR-L3, which collectively contains no more than 5 amino acid variations (e.g., no more than 5, 4, 3, 2 or 1 amino acid variation) as compared with the CDR-L1 having the amino acid sequence of SEQ ID NO: 75, CDR-L2 having the amino acid sequence of SEQ ID NO: 45, and CDR-L3 having the amino acid sequence of SEQ ID NO: 135.

[0282] In some embodiments, the anti-TfR antibody of the present disclosure comprises a CDR-H1, a CDR-H2, and a CDR-H3 that collectively are at least 75% (e.g., 75%, 80%, 85%, 90%, 95%, 98%, or 99%) identical to the CDR-H1 having the amino acid sequence of SEQ ID NO: 79, CDR-H2 having the amino acid sequence of SEQ ID NO: 2, and CDR-H3 having the amino acid sequence of SEQ ID NO: 134. Alternatively or in addition (e.g., in addition), the anti-TfR antibody of the present disclosure comprises a CDR-L1, a CDR-L2, and a CDR-L3 that collectively are at least 75% (e.g., 75%, 80%, 85%, 90%, 95%, 98%, or 99%) identical to the to the CDR-L1 having the amino acid sequence of SEQ ID NO: 75, CDR-L2 having the amino acid sequence of SEQ ID NO: 45, and CDR-L3 having the amino acid sequence of SEQ ID NO: 135.

[0283] In some embodiments, the anti-TfR antibody of the present disclosure comprises: a CDR-H1 having no more than 3 amino acid variations (e.g., no more than 3, 2, or 1 amino acid variation) as compared with the CDR-H1 having the amino acid sequence of SEQ ID NO: 79; a CDR-H2 having no more than 3 amino acid variations (e.g., no more than 3, 2, or 1 amino acid variation) as compared with the CDR-H2 having the amino acid sequence of SEQ ID NO: 2; and/or (e.g., and) a CDR-H3 having no more than 3 amino acid variations (e.g., no more than 3, 2, or 1 amino acid variation) as compared with the CDR-H3 having the amino acid sequence of SEQ ID NO: 134. Alternatively or in addition (e.g., in addition), the anti-TfR antibody of the present disclosure comprises: a CDR-L1 having no more than 3 amino acid variations (e.g., no more than 3, 2, or 1 amino acid variation) as compared with the CDR-L1 having the amino acid sequence of SEQ ID NO: 75; a CDR-L2 having no more than 3 amino acid variations (e.g., no more than 3, 2, or 1 amino acid variation) as compared with the CDR-L2 having the amino acid sequence of SEQ ID NO: 45; and/or (e.g., and) a CDR-L3 having no more than 3 amino acid variations (e.g., no more than 3, 2, or 1 amino acid variation) as compared with the CDR-L3 having the amino acid sequence of SEQ ID NO: 135.

[0284] In some embodiments, the anti-TfR antibody of the present disclosure comprises a VH comprising the amino acid sequence of SEQ ID NO: 136. Alternatively or in addition (e.g., in addition), the anti-TfR antibody of the present disclosure comprises a VL comprising the amino acid sequence of SEQ ID NO: 137.

[0285] In some embodiments, the anti-TfR antibody of the present disclosure comprises a VH containing no more than 25 amino acid variations (e.g., no more than 25, 24, 23, 22, 21, 20, 19, 18, 17, 16, 15, 14, 13, 12, 11, 10, 9, 8, 7, 6, 5, 4, 3, 2, or 1 amino acid variation) as compared with the VH as set forth in SEQ ID NO: 136. Alternatively or in addition (e.g., in addition), the anti-TfR antibody of the present disclosure comprises a VL containing no more than 25 amino acid variations (e.g., no more than 25, 24, 23, 22, 21, 20, 19, 18, 17, 16, 15, 14, 13, 12, 11, 10, 9, 8, 7, 6, 5, 4, 3, 2, or 1 amino acid variation) as compared with the VL as set forth in SEQ ID NO: 137.

[0286] In some embodiments, the anti-TfR antibody of the present disclosure comprises a VH comprising an amino acid sequence that is at least 75% (e.g., 75%, 80%, 85%, 90%, 95%, 98%, or 99%) identical to the VH as set forth in SEQ ID NO: 136. Alternatively or in addition (e.g., in addition), the anti-TfR antibody of the present disclosure comprises a VL comprising an amino acid sequence that is at least 75% (e.g., 75%, 80%, 85%, 90%, 95%, 98%, or 99%) identical to the VL as set forth in SEQ ID NO: 137.

[0287] In some embodiments, the anti-TfR antibody of the present disclosure comprises a CDR-H1, a CDR-H2, and a CDR-H3 of a heavy chain variable domain having the amino acid sequence of SEQ ID NO: 143. Alternatively or in addition (e.g., in addition), the anti-TfR antibody of the present disclosure comprises a CDR-L1, a CDR-L2, and a CDR-L3 of a light chain variable domain having the amino acid sequence of SEQ ID NO: 144.

[0288] In some embodiments, the anti-TfR antibody of the present disclosure comprises a CDR-H1 having the amino acid sequence of SEQ ID NO: 138 (according to the IMGT definition system), a CDR-H2 having the amino acid sequence of SEQ ID NO: 139 (according to the IMGT definition system), a CDR-H3 having the amino acid sequence of SEQ ID NO: 140 (according to the IMGT definition system), a CDR-L1 having the amino acid sequence of SEQ ID NO: 141 (according to the IMGT definition system), a CDR-L2 having the amino acid sequence of SEQ ID NO: 29 (according to the IMGT definition system), and a CDR-L3 having the amino acid sequence of SEQ ID NO: 142 (according to the IMGT definition system).

[0289] In some embodiments, anti-TfR antibody of the present disclosure comprises a CDR-H1, a CDR-H2, and a CDR-H3, which collectively contains no more than 5 amino acid variation (e.g., no more than 5, 4, 3, 2, or 1 amino acid variation) as compared with the CDR-H1 having the amino acid sequence of SEQ ID NO: 138, CDR-H2 having the amino acid sequence of SEQ ID NO: 139, and CDR-H3 having the amino acid sequence of SEQ ID NO: 140. Alternatively or in addition (e.g., in addition), the anti-TfR antibody of the present disclosure comprises a CDR-L1, a CDR-L2, and a CDR-L3, which collectively contains no more than 5 amino acid variations (e.g., no more than 5, 4, 3, 2 or 1 amino acid variation) as compared with the CDR-L1 having the amino acid sequence of SEQ ID NO: 141, CDR-L2 having the amino acid sequence of SEQ ID NO: 29, and CDR-L3 having the amino acid sequence of SEQ ID NO: 142.

[0290] In some embodiments, the anti-TfR antibody of the present disclosure comprises a CDR-H1, a CDR-H2, and a CDR-H3 that collectively are at least 75% (e.g., 75%, 80%, 85%, 90%, 95%, 98%, or 99%) identical to the CDR-H1 having the amino acid sequence of SEQ ID NO: 138, CDR-H2 having the amino acid sequence of SEQ ID NO: 139, and CDR-H3 having the amino acid sequence of SEQ ID NO: 140. Alternatively or in addition (e.g., in addition), the anti-TfR antibody of the present disclosure comprises a CDR-L1, a CDR-L2, and a CDR-L3 that collectively are at least 75% (e.g., 75%, 80%, 85%, 90%, 95%, 98%, or 99%) identical to the to the CDR-L1 having the amino acid sequence of SEQ ID NO: 141, CDR-L2 having the amino acid sequence of SEQ ID NO: 29, and CDR-L3 having the amino acid sequence of SEQ ID NO: 142.

[0291] In some embodiments, the anti-TfR antibody of the present disclosure comprises: a CDR-H1 having no more than 3 amino acid variations (e.g., no more than 3, 2, or 1 amino acid variation) as compared with the CDR-H1 having the amino acid sequence of SEQ ID NO: 138; a CDR-H2 having no more than 3 amino acid variations (e.g., no more than 3, 2, or 1 amino acid variation) as compared with the CDR-H2 having the amino acid sequence of SEQ ID NO: 139; and/or (e.g., and) a CDR-H3 having no more than 3 amino acid variations (e.g., no more than 3, 2, or 1 amino acid variation) as compared with the CDR-H3 having the amino acid sequence of SEQ ID NO: 140. Alternatively or in addition (e.g., in addition), the anti-TfR antibody of the present disclosure comprises: a CDR-L1 having no more than 3 amino acid variations (e.g., no more than 3, 2, or 1 amino acid variation) as compared with the CDR-L1 having the amino acid sequence of SEQ ID NO: 141; a CDR-L2 having no more than 3 amino acid variations (e.g., no more than 3, 2, or 1 amino acid variation) as compared with the CDR-L2 having the amino acid sequence of SEQ ID NO: 29; and/or (e.g., and) a CDR-L3 having no more than 3 amino acid variations (e.g., no more than 3, 2, or 1 amino acid variation) as compared with the CDR-L3 having the amino acid sequence of SEQ ID NO: 142.

[0292] In some embodiments, the anti-TfR antibody of the present disclosure comprises a VH comprising the amino acid sequence of SEQ ID NO: 143. Alternatively or in addition (e.g., in addition), the anti-TfR antibody of the present disclosure comprises a VL comprising the amino acid sequence of SEQ ID NO: 144.

[0293] In some embodiments, the anti-TfR antibody of the present disclosure comprises a VH containing no more than 25 amino acid variations (e.g., no more than 25, 24, 23, 22, 21, 20, 19, 18, 17, 16, 15, 14, 13, 12, 11, 10, 9, 8, 7, 6, 5, 4, 3, 2, or 1 amino acid variation) as compared with the VH as set forth in SEQ ID NO: 143. Alternatively or in addition (e.g., in addition), the anti-TfR antibody of the present disclosure comprises a VL containing no more than 25 amino acid variations (e.g., no more than 25, 24, 23, 22, 21, 20, 19, 18, 17, 16, 15, 14, 13, 12, 11, 10, 9, 8, 7, 6, 5, 4, 3, 2, or 1 amino acid variation) as compared with the VL as set forth in SEQ ID NO: 144.

[0294] In some embodiments, the anti-TfR antibody of the present disclosure comprises a VH comprising an amino acid sequence that is at least 75% (e.g., 75%, 80%, 85%, 90%, 95%, 98%, or 99%) identical to the VH as set forth in SEQ ID NO: 143. Alternatively or in addition (e.g., in addition), the anti-TfR antibody of the present disclosure comprises a VL comprising an amino acid sequence that is at least 75% (e.g., 75%, 80%, 85%, 90%, 95%, 98%, or 99%) identical to the VL as set forth in SEQ ID NO: 144.

[0295] The CDRs of an antibody may have different amino acid sequences when different definition systems are used (e.g., the IMGT definition, the Kabat definition, or the Chothia definition). A definition system annotates each amino acid in a given antibody sequence (e.g., VH or VL sequence) with a number, and numbers corresponding to the heavy chain and light chain CDRs are provided in Table 3. The CDRs listed in Table 2 are defined in accordance with the IMGT definition. CDR sequences of examples of anti-TfR antibodies according to the different definition systems are provided in Table 4. One skilled in the art is able to derive the CDR sequences using the different numbering systems for the anti-TfR antibodies provided in Table 2.

TABLE 3
CDR Definitions

| | IMGT¹ | Kabat² | Chothia³ |
|---|---|---|---|
| CDR-H1 | 27-38 | 31-35 | 26-32 |
| CDR-H2 | 56-65 | 50-65 | 53-55 |
| CDR-H3 | 105-116/117 | 95-102 | 96-101 |
| CDR-L1 | 27-38 | 24-34 | 26-32 |
| CDR-L2 | 56-65 | 50-56 | 50-52 |
| CDR-L3 | 105-116/117 | 89-97 | 91-96 |

¹IMGT ®, the international ImMunoGeneTics information system ®, imgt.org, Lefranc, M.-P. et al., Nucleic Acids Res., 27: 209-212 (1999)
²Kabat et al. (1991) Sequences of Proteins of Immunological Interest, Fifth Edition, U.S. Department of Health and Human Services, NIH Publication No. 91-3242
³Chothia et al., J. Mol. Biol. 196: 901-917 (1987))

TABLE 4
CDR sequences of examples of anti-TfR antibodies according
to different definition systems

| | No. | | | |
|---|---|---|---|---|
| | system | IMGT | Kabat | Chothia |
| 3-A4 | CDR-H1 | GFNIKDDY (SEQ ID NO: 1) | DDYMY (SEQ ID NO: | GFNIKDD (SEQ ID NO: |
| | | | 145) | 150) |
| | CDR-H2 | IDPENGDT (SEQ ID NO: 2) | WIDPENGDTEYASKFQD | ENG (SEQ ID NO: 151) |
| | | | (SEQ ID NO: 146) | |
| | CDR-H3 | TLWLRRGLDY (SEQ ID | WLRRGLDY (SEQ ID | LRRGLD (SEQ ID NO: |
| | | NO: 3) | NO: 147) | 152) |
| | CDR-L1 | KSLLHSNGYTY (SEQ ID | RSSKSLLHSNGYTYLF | SKSLLHSNGYTY(SEQ |
| | | NO: 4) | (SEQ ID NO: 148) | ID NO: 153) |
| | CDR-L2 | RMS (SEQ ID NO: 5) | RMSNLAS (SEQ ID NO: | RMS(SEQ ID NO: 5) |
| | | | 149) | |
| | CDR-L3 | MQHLEYPFT (SEQ ID NO: | MQHLEYPFT (SEQ ID | HLEYPF (SEQ ID NO: |
| | | 6) | NO: 6) | 154) |
| 3-A4 | CDR-H1 | GFNIKDDY (SEQ ID NO: 1) | DDYMY (SEQ ID NO: | GFNIKDD (SEQ ID NO: |
| Variant 1 | | | 145) | 150) |
| | CDR-H2 | IDPETGDT (SEQ ID NO: | WIDPETGDTEYASKFQD | ETG (SEQ ID NO: 739) |
| | | 731) | (SEQ ID NO: 732) | |
| | CDR-H3 | TLWLRRGLDY (SEQ ID | WLRRGLDY (SEQ ID | LRRGLD (SEQ ID NO: |
| | | NO: 3) | NO: 147) | 152) |
| | CDR-L1 | KSLLHSNGYTY (SEQ ID | RSSKSLLHSNGYTYLF | SKSLLHSNGYTY(SEQ |
| | | NO: 4) | (SEQ ID NO: 148) | ID NO: 153) |
| | CDR-L2 | RMS (SEQ ID NO: 5) | RMSNLAS (SEQ ID NO: | RMS(SEQ ID NO: 5) |
| | | | 149) | |
| | CDR-L3 | MQHLEYPFT (SEQ ID NO: | MQHLEYPFT (SEQ ID | HLEYPF (SEQ ID NO: |
| | | 6) | NO: 6) | 154) |
| 3-A4 | CDR-H1 | GFNIKDDY (SEQ ID NO: 1) | DDYMY (SEQ ID NO: | GFNIKDD (SEQ ID NO: |
| Variant 2 | | | 145) | 150) |
| | CDR-H2 | IDPESGDT (SEQ ID NO: | WIDPESGDTEYASKFQD | ESG (SEQ ID NO: 740) |
| | | 80) | (SEQ ID NO: 734) | |
| | CDR-H3 | TLWLRRGLDY (SEQ ID | WLRRGLDY (SEQ ID | LRRGLD (SEQ ID NO: |
| | | NO: 3) | NO: 147) | 152) |
| | CDR-L1 | KSLLHSNGYTY (SEQ ID | RSSKSLLHSNGYTYLF | SKSLLHSNGYTY(SEQ |
| | | NO: 4) | (SEQ ID NO: 148) | ID NO: 153) |
| | CDR-L2 | RMS (SEQ ID NO: 5) | RMSNLAS (SEQ ID NO: | RMS(SEQ ID NO: 5) |
| | | | 149) | |
| | CDR-L3 | MQHLEYPFT (SEQ ID NO: | MQHLEYPFT (SEQ ID | HLEYPF (SEQ ID NO: |
| | | 6) | NO: 6) | 154) |
| 3-M12 | CDR-H1 | GYSITSGYY (SEQ ID NO: | SGYYWN (SEQ ID NO: | GYSITSGY (SEQ ID NO: |
| | | 9) | 155) | 160) |
| | CDR-H2 | ITFDGAN (SEQ ID NO: 10) | YITFDGANNYNPSLKN | FDG (SEQ ID NO: 161) |
| | | | (SEQ ID NO: 156) | |
| | CDR-H3 | TRSSYDYDVLDY (SEQ ID | SSYDYDVLDY (SEQ ID | SYDYDVLD (SEQ ID |
| | | NO: 11) | NO: 157) | NO: 162) |
| | CDR-L1 | QDISNF (SEQ ID NO: 12) | RASQDISNFLN (SEQ ID | SQDISNF (SEQ ID NO: |
| | | | NO: 158) | 163) |
| | CDR-L2 | YTS (SEQ ID NO: 13) | YTSRLHS (SEQ ID NO: | YTS (SEQ ID NO: 13) |
| | | | 159) | |
| | CDR-L3 | QQGHTLPYT (SEQ ID NO: | QQGHTLPYT (SEQ ID | GHTLPY (SEQ ID NO: |
| | | 14) | NO: 14) | 164) |
| 5-H12 | CDR-H1 | GYSFTDYC (SEQ ID NO: | DYCIN (SEQ ID NO: 165) | GYSFTDY (SEQ ID NO: |
| | | 17) | | 170) |
| | CDR-H2 | IYPGSGNT (SEQ ID NO: | WIYPGSGNTRYSERFKG | GSG |
| | | 18) | (SEQ ID NO: 166) | (SEQ ID NO: 171) |
| | CDR-H3 | AREDYYPYHGMDY (SEQ | EDYYPYHGMDY (SEQ | DYYPYHGMD (SEQ ID |
| | | ID NO: 19) | ID NO: 167) | NO: 172) |
| | CDR-L1 | ESVDGYDNSF (SEQ ID | RASES VDGYDNSFMH | SESVDGYDNSF (SEQ ID |
| | | NO: 20) | (SEQ ID NO: 168) | NO: 173) |
| | CDR-L2 | RAS (SEQ ID NO: 21) | RASNLES (SEQ ID NO: | RAS (SEQ ID NO: 21) |
| | | | 169) | |
| | CDR-L3 | QQSSEDPWT (SEQ ID NO: | QQSSEDPWT (SEQ ID | SSEDPW (SEQ ID NO: |
| | | 22) | NO: 22) | 174) |
| 5-H12 | CDR-H1 | GYSFTDYY (SEQ ID NO: | DYYIN (SEQ ID NO: 736) | GYSFTDY (SEQ ID NO: |
| Variant 1 | | 735) | | 170) |
| | CDR-H2 | IYPGSGNT (SEQ ID NO: | WIYPGSGNTRYSERFKG | GSG (SEQ ID NO: 171) |
| | | 18) | (SEQ ID NO: 166) | |
| | CDR-H3 | AREDYYPYHGMDY (SEQ | EDYYPYHGMDY (SEQ | DYYPYHGMD (SEQ ID |
| | | ID NO: 19) | ID NO: 167) | NO: 172) |
| | CDR-L1 | ESVDGYDNSF (SEQ ID | RASES VDGYDNSFMH | SESVDGYDNSF (SEQ ID |
| | | NO: 20) | (SEQ ID NO: 168) | NO: 173) |
| | CDR-L2 | RAS (SEQ ID NO: 21) | RASNLES (SEQ ID NO: | RAS (SEQ ID NO: 21) |
| | | | 169) | |
| | CDR-L3 | QQSSEDPWT (SEQ ID NO: | QQSSEDPWT (SEQ ID | SSEDPW (SEQ ID NO: |
| | | 22) | NO: 22) | 174) |
| 5-H12 | CDR-H1 | GYSFTDYD (SEQ ID NO: | DYDIN (SEQ ID NO: 738) | GYSFTDY (SEQ ID NO: |
| Variant 2 | | 737) | | 170) |
| | CDR-H2 | IYPGSGNT (SEQ ID NO: | WIYPGSGNTRYSERFKG | GSG (SEQ ID NO: 171) |
| | | 18) | (SEQ ID NO: 166) | |
| | CDR-H3 | AREDYYPYHGMDY (SEQ | EDYYPYHGMDY (SEQ | DYYPYHGMD (SEQ ID |
| | | ID NO: 19) | ID NO: 167) | NO: 172) |
| | CDR-L1 | ESVDGYDNSF (SEQ ID | RASES VDGYDNSFMH | SESVDGYDNSF (SEQ ID |
| | | NO: 20) | (SEQ ID NO: 168) | NO: 173) |
| | CDR-L2 | RAS (SEQ ID NO: 21) | RASNLES (SEQ ID NO: | RAS (SEQ ID NO: 21) |
| | | | 169) | |
| | CDR-L3 | QQSSEDPWT (SEQ ID NO: | QQSSEDPWT (SEQ ID | SSEDPW (SEQ ID NO: |
| | | 22) | NO: 22) | 174) |

[0296] In some embodiments, the anti-TfR antibody of the present disclosure comprises a CDR-H1 having the amino acid sequence of SEQ ID NO: 145 (according to the Kabat definition system), a CDR-H2 having the amino acid sequence of SEQ ID NO: 146, SEQ ID NO: 732, or SEQ ID NO: 734 (according to the Kabat definition system), a CDR-H3 having the amino acid sequence of SEQ ID NO: 147 (according to the Kabat definition system), a CDR-L1 having the amino acid sequence of SEQ ID NO: 148 (according to the Kabat definition system), a CDR-L2 having the amino acid sequence of SEQ ID NO: 149 (according to the Kabat definition system), and a CDR-L3 having the amino acid sequence of SEQ ID NO: 6 (according to the Kabat definition system).

[0297] In some embodiments, anti-TfR antibody of the present disclosure comprises a CDR-H1, a CDR-H2, and a CDR-H3, which collectively contains no more than 5 amino acid variation (e.g., no more than 5, 4, 3, 2, or 1 amino acid variation) as compared with the CDR-H1 having the amino acid sequence of SEQ ID NO: 145, CDR-H2 having the amino acid sequence of SEQ ID NO: 146, SEQ ID NO: 732, or SEQ ID NO: 734, and CDR-H3 having the amino acid sequence of SEQ ID NO: 147. Alternatively or in addition (e.g., in addition), the anti-TfR antibody of the present disclosure comprises a CDR-L1, a CDR-L2, and a CDR-L3, which collectively contains no more than 5 amino acid variations (e.g., no more than 5, 4, 3, 2 or 1 amino acid variation) as compared with the CDR-L1 having the amino acid sequence of SEQ ID NO: 148, CDR-L2 having the amino acid sequence of SEQ ID NO: 149, and CDR-L3 having the amino acid sequence of SEQ ID NO: 6.

[0298] In some embodiments, the anti-TfR antibody of the present disclosure comprises a CDR-H1, a CDR-H2, and a CDR-H3 that collectively are at least 75% (e.g., 75%, 80%, 85%, 90%, 95%, 98%, or 99%) identical to the CDR-H1 having the amino acid sequence of SEQ ID NO: 145, CDR-H2 having the amino acid sequence of SEQ ID NO: 146, SEQ ID NO: 732, or SEQ ID NO: 734, and CDR-H3 having the amino acid sequence of SEQ ID NO: 147. Alternatively or in addition (e.g., in addition), the anti-TfR antibody of the present disclosure comprises a CDR-L1, a CDR-L2, and a CDR-L3 that collectively are at least 75% (e.g., 75%, 80%, 85%, 90%, 95%, 98%, or 99%) identical to the to the CDR-L1 having the amino acid sequence of SEQ ID NO: 148, CDR-L2 having the amino acid sequence of SEQ ID NO: 149, and CDR-L3 having the amino acid sequence of SEQ ID NO: 6.

[0299] In some embodiments, the anti-TfR antibody of the present disclosure comprises: a CDR-H1 having no more than 3 amino acid variations (e.g., no more than 3, 2, or 1 amino acid variation) as compared with the CDR-H1 having the amino acid sequence of SEQ ID NO: 145; a CDR-H2 having no more than 3 amino acid variations (e.g., no more than 3, 2, or 1 amino acid variation) as compared with the CDR-H2 having the amino acid sequence of SEQ ID NO: 146, SEQ ID NO: 732, or SEQ ID NO: 734; and/or (e.g., and) a CDR-H3 having no more than 3 amino acid variations (e.g., no more than 3, 2, or 1 amino acid variation) as compared with the CDR-H3 having the amino acid sequence of SEQ ID NO: 147. Alternatively or in addition (e.g., in addition), the anti-TfR antibody of the present disclosure comprises: a CDR-L1 having no more than 3 amino acid variations (e.g., no more than 3, 2, or 1 amino acid variation) as compared with the CDR-L1 having the amino acid sequence of SEQ ID NO: 148; a CDR-L2 having no more than 3 amino acid variations (e.g., no more than 3, 2, or 1 amino acid variation) as compared with the CDR-L2 having the amino acid sequence of SEQ ID NO: 149; and/or (e.g., and) a CDR-L3 having no more than 3 amino acid variations (e.g., no more than 3, 2, or 1 amino acid variation) as compared with the CDR-L3 having the amino acid sequence of SEQ ID NO: 6.

[0300] In some embodiments, the anti-TfR antibody of the present disclosure comprises a CDR-H1 having the amino acid sequence of SEQ ID NO: 150 (according to the Chothia definition system), a CDR-H2 having the amino acid sequence of SEQ ID NO: 151, SEQ ID NO: 739, or SEQ ID NO: 740 (according to the Chothia definition system), a CDR-H3 having the amino acid sequence of SEQ ID NO: 152 (according to the Chothia definition system), a CDR-L1 having the amino acid sequence of SEQ ID NO: 153 (according to the Chothia definition system), a CDR-L2 having the amino acid sequence of SEQ ID NO: 5 (according to the Chothia definition system), and a CDR-L3 having the amino acid sequence of SEQ ID NO: 154 (according to the Chothia definition system).

[0301] In some embodiments, anti-TfR antibody of the present disclosure comprises a CDR-H1, a CDR-H2, and a CDR-H3, which collectively contains no more than 5 amino acid variations (e.g., no more than 5, 4, 3, 2, or 1 amino acid variation) as compared with the CDR-H1 having the amino acid sequence of SEQ ID NO: 150, CDR-H2 having the amino acid sequence of SEQ ID NO: 151, SEQ ID NO: 739, or SEQ ID NO: 740, and CDR-H3 having the amino acid sequence of SEQ ID NO: 152. Alternatively or in addition (e.g., in addition), the anti-TfR antibody of the present disclosure comprises a CDR-L1, a CDR-L2, and a CDR-L3, which collectively contains no more than 5 amino acid variations (e.g., no more than 5, 4, 3, 2 or 1 amino acid variation) as compared with the CDR-L1 having the amino acid sequence of SEQ ID NO: 153, CDR-L2 having the amino acid sequence of SEQ ID NO: 5, and CDR-L3 having the amino acid sequence of SEQ ID NO: 154.

[0302] In some embodiments, the anti-TfR antibody of the present disclosure comprises a CDR-H1, a CDR-H2, and a CDR-H3 that collectively are at least 75% (e.g., 75%, 80%, 85%, 90%, 95%, 98%, or 99%) identical to the CDR-H1 having the amino acid sequence of SEQ ID NO: 150, CDR-H2 having the amino acid sequence of SEQ ID NO: 151, SEQ ID NO: 739, or SEQ ID NO: 740, and CDR-H3 having the amino acid sequence of SEQ ID NO: 152. Alternatively or in addition (e.g., in addition), the anti-TfR antibody of the present disclosure comprises a CDR-L1, a CDR-L2, and a CDR-L3 that collectively are at least 75% (e.g., 75%, 80%, 85%, 90%, 95%, 98%, or 99%) identical to the to the CDR-L1 having the amino acid sequence of SEQ ID NO: 153, CDR-L2 having the amino acid sequence of SEQ ID NO: 5, and CDR-L3 having the amino acid sequence of SEQ ID NO: 154.

[0303] In some embodiments, the anti-TfR antibody of the present disclosure comprises: a CDR-H1 having no more than 3 amino acid variations (e.g., no more than 3, 2, or 1 amino acid variation) as compared with the CDR-H1 having the amino acid sequence of SEQ ID NO: 150; a CDR-H2 having no more than 3 amino acid variations (e.g., no more than 3, 2, or 1 amino acid variation) as compared with the CDR-H2 having the amino acid sequence of SEQ ID NO: 151, SEQ ID NO: 739, or SEQ ID NO: 740; and/or (e.g., and) a CDR-H3 having no more than 3 amino acid variations (e.g., no more than 3, 2, or 1 amino acid variation) as compared with the CDR-H3 having the amino acid sequence of SEQ ID NO: 152. Alternatively or in addition (e.g., in addition), the anti-TfR antibody of the present disclosure comprises: a CDR-L1 having no more than 3 amino acid variations (e.g., no more than 3, 2, or 1 amino acid variation) as compared with the CDR-L1 having the amino acid sequence of SEQ ID NO: 153; a CDR-L2 having no more than 3 amino acid variations (e.g., no more than 3, 2, or 1 amino acid variation) as compared with the CDR-L2 having the amino acid sequence of SEQ ID NO: 5; and/or (e.g., and) a CDR-L3 having no more than 3 amino acid variations (e.g., no more than 3, 2, or 1 amino acid variation) as compared with the CDR-L3 having the amino acid sequence of SEQ ID NO: 154.

[0304] In some embodiments, the anti-TfR antibody of the present disclosure comprises a CDR-H1 having the amino acid sequence of SEQ ID NO: 155 (according to the Kabat definition system), a CDR-H2 having the amino acid sequence of SEQ ID NO: 156 (according to the Kabat definition system), a CDR-H3 having the amino acid sequence of SEQ ID NO: 157 (according to the Kabat definition system), a CDR-L1 having the amino acid sequence of SEQ ID NO: 158 (according to the Kabat definition system), a CDR-L2 having the amino acid sequence of SEQ ID NO: 159 (according to the Kabat definition system), and a CDR-L3 having the amino acid sequence of SEQ ID NO: 14 (according to the Kabat definition system).

[0305] In some embodiments, anti-TfR antibody of the present disclosure comprises a CDR-H1, a CDR-H2, and a CDR-H3, which collectively contains no more than 5 amino acid variations (e.g., no more than 5, 4, 3, 2, or 1 amino acid variation) as compared with the CDR-H1 having the amino acid sequence of SEQ ID NO: 155, CDR-H2 having the amino acid sequence of SEQ ID NO: 156, and CDR-H3 having the amino acid sequence of SEQ ID NO: 157. Alternatively or in addition (e.g., in addition), the anti-TfR antibody of the present disclosure comprises a CDR-L1, a CDR-L2, and a CDR-L3, which collectively contains no more than 5 amino acid variations (e.g., no more than 5, 4, 3, 2 or 1 amino acid variation) as compared with the CDR-L1 having the amino acid sequence of SEQ ID NO: 158, CDR-L2 having the amino acid sequence of SEQ ID NO: 159, and CDR-L3 having the amino acid sequence of SEQ ID NO: 14.

[0306] In some embodiments, the anti-TfR antibody of the present disclosure comprises a CDR-H1, a CDR-H2, and a CDR-H3 that collectively are at least 75% (e.g., 75%, 80%, 85%, 90%, 95%, 98%, or 99%) identical to the CDR-H1 having the amino acid sequence of SEQ ID NO: 155, CDR-H2 having the amino acid sequence of SEQ ID NO: 156, and CDR-H3 having the amino acid sequence of SEQ ID NO: 157. Alternatively or in addition (e.g., in addition), the anti-TfR antibody of the present disclosure comprises a CDR-L1, a CDR-L2, and a CDR-L3 that collectively are at least 75% (e.g., 75%, 80%, 85%, 90%, 95%, 98%, or 99%) identical to the to the CDR-L1 having the amino acid sequence of SEQ ID NO: 158, CDR-L2 having the amino acid sequence of SEQ ID NO: 159, and CDR-L3 having the amino acid sequence of SEQ ID NO: 14.

[0307] In some embodiments, the anti-TfR antibody of the present disclosure comprises: a CDR-H1 having no more than 3 amino acid variations (e.g., no more than 3, 2, or 1 amino acid variation) as compared with the CDR-H1 having the amino acid sequence of SEQ ID NO: 155; a CDR-H2 having no more than 3 amino acid variations (e.g., no more than 3, 2, or 1 amino acid variation) as compared with the CDR-H2 having the amino acid sequence of SEQ ID NO: 156; and/or (e.g., and) a CDR-H3 having no more than 3 amino acid variations (e.g., no more than 3, 2, or 1 amino acid variation) as compared with the CDR-H3 having the amino acid sequence of SEQ ID NO: 157. Alternatively or in addition (e.g., in addition), the anti-TfR antibody of the present disclosure comprises: a CDR-L1 having no more than 3 amino acid variations (e.g., no more than 3, 2, or 1 amino acid variation) as compared with the CDR-L1 having the amino acid sequence of SEQ ID NO: 158; a CDR-L2 having no more than 3 amino acid variations (e.g., no more than 3, 2, or 1 amino acid variation) as compared with the CDR-L2 having the amino acid sequence of SEQ ID NO: 159; and/or (e.g., and) a CDR-L3 having no more than 3 amino acid variations (e.g., no more than 3, 2, or 1 amino acid variation) as compared with the CDR-L3 having the amino acid sequence of SEQ ID NO: 14.

[0308] In some embodiments, the anti-TfR antibody of the present disclosure comprises a CDR-H1 having the amino acid sequence of SEQ ID NO: 160 (according to the Chothia definition system), a CDR-H2 having the amino acid sequence of SEQ ID NO: 161 (according to the Chothia definition system), a CDR-H3 having the amino acid sequence of SEQ ID NO: 162 (according to the Chothia definition system), a CDR-L1 having the amino acid sequence of SEQ ID NO: 163 (according to the Chothia definition system), a CDR-L2 having the amino acid sequence of SEQ ID NO: 13 (according to the Chothia definition system), and a CDR-L3 having the amino acid sequence of SEQ ID NO: 164 (according to the Chothia definition system).

[0309] In some embodiments, anti-TfR antibody of the present disclosure comprises a CDR-H1, a CDR-H2, and a CDR-H3, which collectively contains no more than 5 amino acid variation (e.g., no more than 5, 4, 3, 2, or 1 amino acid variation) as compared with the CDR-H1 having the amino acid sequence of SEQ ID NO: 160, CDR-H2 having the amino acid sequence of SEQ ID NO: 161, and CDR-H3 having the amino acid sequence of SEQ ID NO: 162. Alternatively or in addition (e.g., in addition), the anti-TfR antibody of the present disclosure comprises a CDR-L1, a CDR-L2, and a CDR-L3, which collectively contains no more than 5 amino acid variations (e.g., no more than 5, 4, 3, 2 or 1 amino acid variation) as compared with the CDR-L1 having the amino acid sequence of SEQ ID NO: 163, CDR-L2 having the amino acid sequence of SEQ ID NO: 13, and CDR-L3 having the amino acid sequence of SEQ ID NO: 164.

[0310] In some embodiments, the anti-TfR antibody of the present disclosure comprises a CDR-H1, a CDR-H2, and a CDR-H3 that collectively are at least 75% (e.g., 75%, 80%, 85%, 90%, 95%, 98%, or 99%) identical to the CDR-H1 having the amino acid sequence of SEQ ID NO: 160, CDR-H2 having the amino acid sequence of SEQ ID NO: 161, and CDR-H3 having the amino acid sequence of SEQ ID NO: 162. Alternatively or in addition (e.g., in addition), the anti-TfR antibody of the present disclosure comprises a CDR-L1, a CDR-L2, and a CDR-L3 that collectively are at least 75% (e.g., 75%, 80%, 85%, 90%, 95%, 98%, or 99%) identical to the to the CDR-L1 having the amino acid sequence of SEQ ID NO: 163, CDR-L2 having the amino acid sequence of SEQ ID NO: 13, and CDR-L3 having the amino acid sequence of SEQ ID NO: 164.

[0311] In some embodiments, the anti-TfR antibody of the present disclosure comprises: a CDR-H1 having no more than 3 amino acid variations (e.g., no more than 3, 2, or 1 amino acid variation) as compared with the CDR-H1 having the amino acid sequence of SEQ ID NO: 160; a CDR-H2 having no more than 3 amino acid variations (e.g., no more than 3, 2, or 1 amino acid variation) as compared with the CDR-H2 having the amino acid sequence of SEQ ID NO: 161; and/or (e.g., and) a CDR-H3 having no more than 3 amino acid variations (e.g., no more than 3, 2, or 1 amino acid variation) as compared with the CDR-H3 having the amino acid sequence of SEQ ID NO: 162. Alternatively or in addition (e.g., in addition), the anti-TfR antibody of the present disclosure comprises: a CDR-L1 having no more than 3 amino acid variations (e.g., no more than 3, 2, or 1 amino acid variation) as compared with the CDR-L1 having the amino acid sequence of SEQ ID NO: 163; a CDR-L2 having no more than 3 amino acid variations (e.g., no more than 3, 2, or 1 amino acid variation) as compared with the CDR-L2 having the amino acid sequence of SEQ ID NO: 13; and/or (e.g., and) a CDR-L3 having no more than 3 amino acid variations (e.g., no more than 3, 2, or 1 amino acid variation) as compared with the CDR-L3 having the amino acid sequence of SEQ ID NO: 164.

[0312] In some embodiments, the anti-TfR antibody of the present disclosure comprises a CDR-H1 having the amino acid sequence of SEQ ID NO: 165, SEQ ID NO: 736, or SEQ ID NO: 738 (according to the Kabat definition system), a CDR-H2 having the amino acid sequence of SEQ ID NO: 166 (according to the Kabat definition system), a CDR-H3 having the amino acid sequence of SEQ ID NO: 167 (according to the Kabat definition system), a CDR-L1 having the amino acid sequence of SEQ ID NO: 168 (according to the Kabat definition system), a CDR-L2 having the amino acid sequence of SEQ ID NO: 169 (according to the Kabat definition system), and a CDR-L3 having the amino acid sequence of SEQ ID NO: 22 (according to the Kabat definition system).

[0313] In some embodiments, anti-TfR antibody of the present disclosure comprises a CDR-H1, a CDR-H2, and a CDR-H3, which collectively contains no more than 5 amino acid variations (e.g., no more than 5, 4, 3, 2, or 1 amino acid variation) as compared with the CDR-H1 having the amino acid sequence of SEQ ID NO: 165, SEQ ID NO: 736, or SEQ ID NO: 738, CDR-H2 having the amino acid sequence of SEQ ID NO: 166, and CDR-H3 having the amino acid sequence of SEQ ID NO: 167. Alternatively or in addition (e.g., in addition), the anti-TfR antibody of the present disclosure comprises a CDR-L1, a CDR-L2, and a CDR-L3, which collectively contains no more than 5 amino acid variations (e.g., no more than 5, 4, 3, 2 or 1 amino acid variation) as compared with the CDR-L1 having the amino acid sequence of SEQ ID NO: 168, CDR-L2 having the amino acid sequence of SEQ ID NO: 169, and CDR-L3 having the amino acid sequence of SEQ ID NO: 22.

[0314] In some embodiments, the anti-TfR antibody of the present disclosure comprises a CDR-H1, a CDR-H2, and a CDR-H3 that collectively are at least 75% (e.g., 75%, 80%, 85%, 90%, 95%, 98%, or 99%) identical to the CDR-H1 having the amino acid sequence of SEQ ID NO: 165, SEQ ID NO: 736, or SEQ ID NO: 738, CDR-H2 having the amino acid sequence of SEQ ID NO: 166, and CDR-H3 having the amino acid sequence of SEQ ID NO: 167. Alternatively or in addition (e.g., in addition), the anti-TfR antibody of the present disclosure comprises a CDR-L1, a CDR-L2, and a CDR-L3 that collectively are at least 75% (e.g., 75%, 80%, 85%, 90%, 95%, 98%, or 99%) identical to the to the CDR-L1 having the amino acid sequence of SEQ ID NO: 168, CDR-L2 having the amino acid sequence of SEQ ID NO: 169, and CDR-L3 having the amino acid sequence of SEQ ID NO: 22.

[0315] In some embodiments, the anti-TfR antibody of the present disclosure comprises: a CDR-H1 having no more than 3 amino acid variations (e.g., no more than 3, 2, or 1 amino acid variation) as compared with the CDR-H1 having the amino acid sequence of SEQ ID NO: 165, SEQ ID NO: 736, or SEQ ID NO: 738; a CDR-H2 having no more than 3 amino acid variations (e.g., no more than 3, 2, or 1 amino acid variation) as compared with the CDR-H2 having the amino acid sequence of SEQ ID NO: 166; and/or (e.g., and) a CDR-H3 having no more than 3 amino acid variations (e.g., no more than 3, 2, or 1 amino acid variation) as compared with the CDR-H3 having the amino acid sequence of SEQ ID NO: 167. Alternatively or in addition (e.g., in addition), the anti-TfR antibody of the present disclosure comprises: a CDR-L1 having no more than 3 amino acid variations (e.g., no more than 3, 2, or 1 amino acid variation) as compared with the CDR-L1 having the amino acid sequence of SEQ ID NO: 168; a CDR-L2 having no more than 3 amino acid variations (e.g., no more than 3, 2, or 1 amino acid variation) as compared with the CDR-L2 having the amino acid sequence of SEQ ID NO: 169; and/or (e.g., and) a CDR-L3 having no more than 3 amino acid variations (e.g., no more than 3, 2, or 1 amino acid variation) as compared with the CDR-L3 having the amino acid sequence of SEQ ID NO: 22.

[0316] In some embodiments, the anti-TfR antibody of the present disclosure comprises a CDR-H1 having the amino acid sequence of SEQ ID NO: 170 (according to the Chothia definition system), a CDR-H2 having the amino acid sequence of SEQ ID NO: 171 (according to the Chothia definition system), a CDR-H3 having the amino acid sequence of SEQ ID NO: 172 (according to the Chothia definition system), a CDR-L1 having the amino acid sequence of SEQ ID NO: 173 (according to the Chothia definition system), a CDR-L2 having the amino acid sequence of SEQ ID NO: 21 (according to the Chothia definition system), and a CDR-L3 having the amino acid sequence of SEQ ID NO: 174 (according to the Chothia definition system).

[0317] In some embodiments, anti-TfR antibody of the present disclosure comprises a CDR-H1, a CDR-H2, and a CDR-H3, which collectively contains no more than 5 amino acid variations (e.g., no more than 5, 4, 3, 2, or 1 amino acid variation) as compared with the CDR-H1 having the amino acid sequence of SEQ ID NO: 170, CDR-H2 having the amino acid sequence of SEQ ID NO: 171, and CDR-H3 having the amino acid sequence of SEQ ID NO: 172. Alternatively or in addition (e.g., in addition), the anti-TfR antibody of the present disclosure comprises a CDR-L1, a CDR-L2, and a CDR-L3, which collectively contains no more than 5 amino acid variations (e.g., no more than 5, 4, 3, 2 or 1 amino acid variation) as compared with the CDR-L1 having the amino acid sequence of SEQ ID NO: 173, CDR-L2 having the amino acid sequence of SEQ ID NO: 21, and CDR-L3 having the amino acid sequence of SEQ ID NO: 174.

[0318] In some embodiments, the anti-TfR antibody of the present disclosure comprises a CDR-H1, a CDR-H2, and a CDR-H3 that collectively are at least 75% (e.g., 75%, 80%, 85%, 90%, 95%, 98%, or 99%) identical to the CDR-H1 having the amino acid sequence of SEQ ID NO: 170, CDR-H2 having the amino acid sequence of SEQ ID NO: 171, and CDR-H3 having the amino acid sequence of SEQ ID NO: 172. Alternatively or in addition (e.g., in addition), the anti-TfR antibody of the present disclosure comprises a CDR-L1, a CDR-L2, and a CDR-L3 that collectively are at least 75% (e.g., 75%, 80%, 85%, 90%, 95%, 98%, or 99%) identical to the to the CDR-L1 having the amino acid sequence of SEQ ID NO: 173, CDR-L2 having the amino acid sequence of SEQ ID NO: 21, and CDR-L3 having the amino acid sequence of SEQ ID NO: 174.

[0319] In some embodiments, the anti-TfR antibody of the present disclosure comprises: a CDR-H1 having no more than 3 amino acid variations (e.g., no more than 3, 2, or 1 amino acid variation) as compared with the CDR-H1 having the amino acid sequence of SEQ ID NO: 170; a CDR-H2 having no more than 3 amino acid variations (e.g., no more than 3, 2, or 1 amino acid variation) as compared with the CDR-H2 having the amino acid sequence of SEQ ID NO: 171; and/or (e.g., and) a CDR-H3 having no more than 3 amino acid variations (e.g., no more than 3, 2, or 1 amino acid variation) as compared with the CDR-H3 having the amino acid sequence of SEQ ID NO: 172. Alternatively or in addition (e.g., in addition), the anti-TfR antibody of the present disclosure comprises: a CDR-L1 having no more than 3 amino acid variations (e.g., no more than 3, 2, or 1 amino acid variation) as compared with the CDR-L1 having the amino acid sequence of SEQ ID NO: 173; a CDR-L2 having no more than 3 amino acid variations (e.g., no more than 3, 2, or 1 amino acid variation) as compared with the CDR-L2 having the amino acid sequence of SEQ ID NO: 21; and/or (e.g., and) a CDR-L3 having no more than 3 amino acid variations (e.g., no more than 3, 2, or 1 amino acid variation) as compared with the CDR-L3 having the amino acid sequence of SEQ ID NO: 174.

[0320] In some embodiments, the anti-TfR antibody of the present disclosure is a humanized antibody (e.g., a humanized variant containing one or more CDRs of Table 2 or Table 4). In some embodiments, the anti-TfR antibody of the present disclosure comprises a CDR-H1, a CDR-H2, a CDR-H3, a CDR-L1, a CDR-L2, and a CDR-L3 that are the same as the CDR-H1, CDR-H2, and CDR-H3 shown in Table 2 or Table 4, and comprises a humanized heavy chain variable region and/or (e.g., and) a humanized light chain variable region.

[0321] Humanized antibodies are human immunoglobulins (recipient antibody) in which residues from a complementary determining region (CDR) of the recipient are replaced by residues from a CDR of a non-human species (donor antibody) such as mouse, rat, or rabbit having the desired specificity, affinity, and capacity. In some embodiments, Fv framework region (FR) residues of the human immunoglobulin are replaced by corresponding non-human residues. Furthermore, the humanized antibody may comprise residues that are found neither in the recipient antibody nor in the imported CDR or framework sequences, but are included to further refine and optimize antibody performance. In general, the humanized antibody will comprise substantially all of at least one, and typically two, variable domains, in which all or substantially all of the CDR regions correspond to those of a non-human immunoglobulin and all or substantially all of the FR regions are those of a human immunoglobulin consensus sequence. The humanized antibody optimally also will comprise at least a portion of an immunoglobulin constant region or domain (Fc), typically that of a human immunoglobulin. Antibodies may have Fc regions modified as described in WO 99/58572. Other forms of humanized antibodies have one or more CDRs (one, two, three, four, five, six) which are altered with respect to the original antibody, which are also termed one or more CDRs derived from one or more CDRs from the original antibody. Humanized antibodies may also involve affinity maturation.

[0322] Humanized antibodies and methods of making them are known, e.g., as described in Almagro et al., Front. Biosci. 13:1619-1633 (2008); Riechmann et al., Nature 332:323-329 (1988); Queen et al., Proc. Nat'l Acad. Sci. USA 86:10029-10033 (1989); U.S. Pat. Nos. 5,821,337, 7,527,791, 6,982,321, and 7,087,409; Kashmiri et al., Methods 36:25-34 (2005); Padlan et al., Mol. Immunol. 28:489-498 (1991); Dall'Acqua et al., Methods 36:43-60 (2005); Osbourn et al., Methods 36:61-68 (2005); and Klimka et al., Br. J. Cancer, 83:252-260 (2000), the contents of all of which are incorporated herein by reference. Human framework regions that may be used for humanization are described in e.g., Sims et al. J. Immunol. 151:2296 (1993); Carter et al. Proc. Natl. Acad. Sci. USA, 89:4285 (1992); Presta et al. J. Immunol., 151:2623 (1993); Almagro et al., Front. Biosci. 13:1619-1633 (2008)); Baca et al., J. Biol. Chem. 272:10678-10684 (1997); and Rosok et al., J Biol. Chem. 271:22611-22618 (1996), the contents of all of which are incorporated herein by reference. In some embodiments, humanization is achieved by grafting the CDRs (e.g., as shown in Table 2 or Table 4) into the IGKV1-NL1*01 and IGHV1-3*01 human variable domains.

[0323] In some embodiments, a humanized VH framework or VL framework is a consensus human framework. In some embodiments, a consensus humanized framework can represent the most commonly occurring amino acid residue in a selection of human immunoglobulin VL or VH framework sequences.

[0324] In some embodiments, the consensus human VH framework regions suitable for use with heavy chain CDRs in the humanized anti-TfR antibodies described herein include (subgroup III consensus):

a) VH FR1:
(SEQ ID NO: 741)
[sequence omitted];
b) VH FR2:
(SEQ ID NO: 742)
WVRQAPGKGLEWV;
c) VH FR3:
(SEQ ID NO: 743)
RFTISRDNSKNTLYLQMNSLRAEDTAVYYC;
and
d) VH FR4:
(SEQ ID NO: 744)
WGQGTLVTVSS.

[0325] In some embodiments, the consensus human VH framework regions suitable for use with heavy chain CDRs in the humanized anti-TfR antibodies described herein include (subgroup I consensus):

a) VH FR1:
(SEQ ID NO: 745)
[sequence omitted];
b) VH FR2:
(SEQ ID NO: 746)
WVRQAPGQGLEWM;
c) VH FR3:
(SEQ ID NO: 747)
RVTITADTSTSTAYMELSSLRSEDTAVYYC;
and
d) VH FR4:
(SEQ ID NO: 744)
WGQGTLVTVSS.

[0326] In some embodiments, the consensus human VH framework regions suitable for use with heavy chain CDRs in the humanized anti-TfR antibodies described herein include (subgroup II consensus):

a) VH FR1:
(SEQ ID NO: 749)
QVQLQESGPGLVKPSQTLSLTCTVS;
b) VH FR2:
(SEQ ID NO: 750)
WIRQPPGKGLEWI;
c) VH FR3:
(SEQ ID NO: 751)
RVTISVDTSKNQFSLKLSSVTAADTAVYYC;
and
d) VH FR4:
(SEQ ID NO: 744)
WGQGTLVTVSS.

[0327] In some embodiments, the consensus human VL framework regions suitable for use with light chain CDRs in the humanized anti-TfR antibodies described herein include (subgroup I consensus):

a) VL FR1:
(SEQ ID NO: 753)
DIQMTQSPSSLSASVGDRVTITC;
b) VL FR2:
(SEQ ID NO: 754)
WYQQKPGKAPKLLIY;
c) VL FR3:
(SEQ ID NO: 756)
GVPSRFSGSGSGTDFTLTISSLQPEDFATYYC;
and
d) VL FR4:
(SEQ ID NO: 748)
FGQGTKVEIK.

[0328] In some embodiments, the consensus human VL framework regions suitable for use with light chain CDRs in the humanized anti-TfR antibodies described herein include (subgroup II consensus):

a) VL FR1:
(SEQ ID NO: 757)
DIVMTQSPLSLPVTPGEPASISC;
b) VL FR2:
(SEQ ID NO: 758)
WYLQKPGQSPQLLIY;
c) VL FR3:
(SEQ ID NO: 759)
GVPDRFSGSGSGTDFTLKISRVEAEDVGVYYC;
and
d) VL FR4:
(SEQ ID NO: 748)
FGQGTKVEIK.

[0329] In some embodiments, the consensus human VL framework regions suitable for use with light chain CDRs in the humanized anti-TfR antibodies described herein include (subgroup III consensus):

a) VL FR1:
(SEQ ID NO: 752)
DIVMTQSPDSLAVSLGERATINC;
b) VL FR2:
(SEQ ID NO: 755)
WYQQKPGQPPKLLIY;
c) VL FR3:
(SEQ ID NO: 760)
GVPDRFSGSGSGTDFTLTISSLQAEDFAVYYC;
and
d) VL FR4:
(SEQ ID NO: 748)
FGQGTKVEIK.

[0330] In some embodiments, the consensus human VL framework regions suitable for use with light chain CDRs in the humanized anti-TfR antibodies described herein include (subgroup IV consensus):

a) VL FR1:
(SEQ ID NO: 752)
DIVMTQSPDSLAVSLGERATINC;
b) VL FR2:
(SEQ ID NO: 755)
WYQQKPGQPPKLLIY;
c) VL FR3:
(SEQ ID NO: 760)
GVPDRFSGSGSGTDFTLTISSLQAEDFAVYYC;
and
d) VL FR4:
(SEQ ID NO: 748)
FGQGTKVEIK.

[0331] In some embodiments, the humanized anti-TfR antibody of the present disclosure comprises humanized VH framework regions that collectively contain no more than 25 amino acid variations (e.g., no more than 25, 24, 23, 22, 21, 20, 19, 18, 17, 16, 15, 14, 13, 12, 11, 10, 9, 8, 7, 6, 5, 4, 3, 2, or 1 amino acid variation) as compared with any one of the consensus human VH framework region subgroups described herein. Alternatively or in addition (e.g., in addition), the humanized anti-TfR antibody of the present disclosure comprises humanized VL framework regions that collectively contain no more than 25 amino acid variations (e.g., no more than 25, 24, 23, 22, 21, 20, 19, 18, 17, 16, 15, 14, 13, 12, 11, 10, 9, 8, 7, 6, 5, 4, 3, 2, or 1 amino acid variation) as compared with any one of the consensus human VL framework region subgroups described herein.

[0332] In some embodiments, the humanized anti-TfR antibody of the present disclosure comprises humanized VH framework regions that collectively are at least 75% (e.g., 75%, 80%, 85%, 90%, 95%, 98%, or 99%) identical to any one of the consensus human VH framework region subgroups described herein. Alternatively or in addition (e.g., in addition), the humanized anti-TfR antibody of the present disclosure comprises humanized VL framework regions that are at least 75% (e.g., 75%, 80%, 85%, 90%, 95%, 98%, or 99%) identical to any one of the consensus human VL framework region subgroups described herein.

[0333] In some embodiments, the anti-TfR antibody of the present disclosure is a humanized variant comprising one or more amino acid variations (e.g., in the VH framework region) as compared with any one of the VHs listed in Table 2 or Table 4, and/or (e.g., and) one or more amino acid variations (e.g., in the VL framework region) as compared with any one of the VLs listed in Table 2 or Table 4.

[0334] In some embodiments, the anti-TfR antibody of the present disclosure is a humanized antibody comprising a VH containing no more than 25 amino acid variations (e.g., no more than 25, 24, 23, 22, 21, 20, 19, 18, 17, 16, 15, 14, 13, 12, 11, 10, 9, 8, 7, 6, 5, 4, 3, 2, or 1 amino acid variation) as compared with the VH of any of the anti-TfR antibodies listed in Table 2. Alternatively or in addition (e.g., in addition), the anti-TfR antibody of the present disclosure is a humanized antibody comprising a VL containing no more than 25 amino acid variations (e.g., no more than 25, 24, 23, 22, 21, 20, 19, 18, 17, 16, 15, 14, 13, 12, 11, 10, 9, 8, 7, 6, 5, 4, 3, 2, or 1 amino acid variation) as compared with the VL of any one of the anti-TfR antibodies listed in Table 2.

[0335] In some embodiments, the anti-TfR antibody of the present disclosure is a humanized antibody comprising a VH comprising an amino acid sequence that is at least 75% (e.g., 75%, 80%, 85%, 90%, 95%, 98%, or 99%) identical to the VH as set forth in any one of SEQ ID NOs: 7, 15, and 23. Alternatively or in addition (e.g., in addition), the anti-TfR antibody of the present disclosure is a humanized antibody comprising a VL comprising an amino acid sequence that is at least 75% (e.g., 75%, 80%, 85%, 90%, 95%, 98%, or 99%) identical to the VL as set forth in any one of SEQ ID NOs: 8, 16, and 24.

[0336] In some embodiments, the anti-TfR antibody of the present disclosure is a humanized antibody comprising a VH containing no more than 25 amino acid variations (e.g., no more than 25, 24, 23, 22, 21, 20, 19, 18, 17, 16, 15, 14, 13, 12, 11, 10, 9, 8, 7, 6, 5, 4, 3, 2, or 1 amino acid variation) as compared with the VH as set forth in any one of SEQ ID NOs: 7, 15, and 23. Alternatively or in addition (e.g., in addition), the anti-TfR antibody of the present disclosure is a humanized antibody comprising a VL containing no more than 25 amino acid variations (e.g., no more than 25, 24, 23, 22, 21, 20, 19, 18, 17, 16, 15, 14, 13, 12, 11, 10, 9, 8, 7, 6, 5, 4, 3, 2, or 1 amino acid variation) as compared with the VL as set forth in any one of SEQ ID NOs: 8, 16, and 24.

[0337] In some embodiments, the anti-TfR antibody of the present disclosure is a humanized antibody comprising a VH comprising an amino acid sequence that is at least 75% (e.g., 75%, 80%, 85%, 90%, 95%, 98%, or 99%) identical to the VH as set forth in any one of SEQ ID NOs: 7, 15, and 23. Alternatively or in addition (e.g., in addition), the anti-TfR antibody of the present disclosure is a humanized antibody comprising a VL comprising an amino acid sequence that is at least 75% (e.g., 75%, 80%, 85%, 90%, 95%, 98%, or 99%) identical to the VL as set forth in any one of SEQ ID NOs: 8, 16, and 24.

[0338] In some embodiments, the anti-TfR antibody of the present disclosure is a humanized antibody comprising a VH having one or more (e.g., 10-25) amino acid variations at positions 1, 2, 5, 9, 11, 12, 13, 17, 20, 23, 33, 38, 40, 41, 42, 43, 44, 45, 48, 49, 55, 67, 68, 70, 71, 72, 76, 77, 80, 81, 82, 84, 87, 88, 91, 95, 112, or 115 relative to the VH as set forth in any one of SEQ ID NOs: 7, 15, and 23. Alternatively or in addition (e.g., in addition), the anti-TfR antibody of the present disclosure is a humanized antibody comprising a VL having one or more (e.g., 10-20) amino acid variations at positions 4, 7, 8, 9, 11, 15, 17, 18, 19, 22, 39, 41, 42, 43, 50, 62, 64, 72, 75, 77, 79, 80, 81, 82, 83, 85, 87, 89, 100, 104, or 109 relative to the VL as set forth in any one of SEQ ID NOs: 8, 16, and 24.

[0339] In some embodiments, the anti-TfR antibody of the present disclosure comprises a humanized VH comprising a CDR-H1 having the amino acid sequence of SEQ ID NO: 1 (according to the IMGT definition system), a CDR-H2 having the amino acid sequence of SEQ ID NO: 2, SEQ ID NO: 731, or SEQ ID NO: 80 (according to the IMGT definition system), a CDR-H3 having the amino acid sequence of SEQ ID NO: 3 (according to the IMGT definition system), and containing no more than 25 amino acid variations (e.g., no more than 25, 24, 23, 22, 21, 20, 19, 18, 17, 16, 15, 14, 13, 12, 11, 10, 9, 8, 7, 6, 5, 4, 3, 2, or 1 amino acid variation) in the framework regions as compared with the VH as set forth in SEQ ID NO: 7. Alternatively or in addition (e.g., in addition), the anti-TfR antibody of the present disclosure comprises a humanized VL comprising a CDR-L1 having the amino acid sequence of SEQ ID NO: 4 (according to the IMGT definition system), a CDR-L2 having the amino acid sequence of SEQ ID NO: 5 (according to the IMGT definition system), and a CDR-L3 having the amino acid sequence of SEQ ID NO: 6 (according to the IMGT definition system), and containing no more than 25 amino acid variations (e.g., no more than 25, 24, 23, 22, 21, 20, 19, 18, 17, 16, 15, 14, 13, 12, 11, 10, 9, 8, 7, 6, 5, 4, 3, 2, or 1 amino acid variation) in the framework regions as compared with the VL as set forth in SEQ ID NO: 8.

[0340] In some embodiments, the anti-TfR antibody of the present disclosure comprises a humanized VH comprising a CDR-H1 having the amino acid sequence of SEQ ID NO: 1 (according to the IMGT definition system), a CDR-H2 having the amino acid sequence of SEQ ID NO: 2, SEQ ID NO: 731, or SEQ ID NO: 80 (according to the IMGT definition system), a CDR-H3 having the amino acid sequence of SEQ ID NO: 3 (according to the IMGT definition system), and is at least 75% (e.g., 75%, 80%, 85%, 90%, 95%, 98%, or 99%) identical in the framework regions to the VH as set forth in SEQ ID NO: 7. Alternatively or in addition (e.g., in addition), the anti-TfR antibody of the present disclosure comprises a humanized VL comprising a CDR-L1 having the amino acid sequence of SEQ ID NO: 4 (according to the IMGT definition system), a CDR-L2 having the amino acid sequence of SEQ ID NO: 5 (according to the IMGT definition system), and a CDR-L3 having the amino acid sequence of SEQ ID NO: 6 (according to the IMGT definition system), and is at least 75% (e.g., 75%, 80%, 85%, 90%, 95%, 98%, or 99%) identical in the framework regions to the VL as set forth in SEQ ID NO: 8.

[0341] In some embodiments, the anti-TfR antibody of the present disclosure comprises a humanized VH comprising a CDR-H1 having the amino acid sequence of SEQ ID NO: 145 (according to the Kabat definition system), a CDR-H2 having the amino acid sequence of SEQ ID NO: 146, SEQ ID NO: 732, or SEQ ID NO: 734 (according to the Kabat definition system), a CDR-H3 having the amino acid sequence of SEQ ID NO: 147 (according to the Kabat definition system), and containing no more than 25 amino acid variations (e.g., no more than 25, 24, 23, 22, 21, 20, 19, 18, 17, 16, 15, 14, 13, 12, 11, 10, 9, 8, 7, 6, 5, 4, 3, 2, or 1 amino acid variation) in the framework regions as compared with the VH as set forth in SEQ ID NO: 7. Alternatively or in addition (e.g., in addition), the anti-TfR antibody of the present disclosure comprises a humanized VL comprising a CDR-L1 having the amino acid sequence of SEQ ID NO: 148 (according to the Kabat definition system), a CDR-L2 having the amino acid sequence of SEQ ID NO: 149 (according to the Kabat definition system), and a CDR-L3 having the amino acid sequence of SEQ ID NO: 6 (according to the Kabat definition system), and containing no more than 25 amino acid variations (e.g., no more than 25, 24, 23, 22, 21, 20, 19, 18, 17, 16, 15, 14, 13, 12, 11, 10, 9, 8, 7, 6, 5, 4, 3, 2, or 1 amino acid variation) in the framework regions as compared with the VL as set forth in SEQ ID NO: 8.

[0342] In some embodiments, the anti-TfR antibody of the present disclosure comprises a humanized VH comprising a CDR-H1 having the amino acid sequence of SEQ ID NO: 145 (according to the Kabat definition system), a CDR-H2 having the amino acid sequence of SEQ ID NO: 146, SEQ ID NO: 732, or SEQ ID NO: 734 (according to the Kabat definition system), a CDR-H3 having the amino acid sequence of SEQ ID NO: 147 (according to the Kabat definition system), and is at least 75% (e.g., 75%, 80%, 85%, 90%, 95%, 98%, or 99%) identical in the framework regions to the VH as set forth in SEQ ID NO: 7. Alternatively or in addition (e.g., in addition), the anti-TfR antibody of the present disclosure comprises a humanized VL comprising a CDR-L1 having the amino acid sequence of SEQ ID NO: 148 (according to the Kabat definition system), a CDR-L2 having the amino acid sequence of SEQ ID NO: 149 (according to the Kabat definition system), and a CDR-L3 having the amino acid sequence of SEQ ID NO: 6 (according to the Kabat definition system), and is at least 75% (e.g., 75%, 80%, 85%, 90%, 95%, 98%, or 99%) identical in the framework regions to the VL as set forth in SEQ ID NO: 8.

[0343] In some embodiments, the anti-TfR antibody of the present disclosure comprises a humanized VH comprising a CDR-H1 having the amino acid sequence of SEQ ID NO: 150 (according to the Chothia definition system), a CDR-H2 having the amino acid sequence of SEQ ID NO: 151, SEQ ID NO: 739, or SEQ ID NO: 740 (according to the Chothia definition system), a CDR-H3 having the amino acid sequence of SEQ ID NO: 152 (according to the Chothia definition system), and containing no more than 25 amino acid variations (e.g., no more than 25, 24, 23, 22, 21, 20, 19, 18, 17, 16, 15, 14, 13, 12, 11, 10, 9, 8, 7, 6, 5, 4, 3, 2, or 1 amino acid variation) in the framework regions as compared with the VH as set forth in SEQ ID NO: 7. Alternatively or in addition (e.g., in addition), the anti-TfR antibody of the present disclosure comprises a humanized VL comprising a CDR-L1 having the amino acid sequence of SEQ ID NO: 153 (according to the Chothia definition system), a CDR-L2 having the amino acid sequence of SEQ ID NO: 5 (according to the Chothia definition system), and a CDR-L3 having the amino acid sequence of SEQ ID NO: 154 (according to the Chothia definition system), and containing no more than 25 amino acid variations (e.g., no more than 25, 24, 23, 22, 21, 20, 19, 18, 17, 16, 15, 14, 13, 12, 11, 10, 9, 8, 7, 6, 5, 4, 3, 2, or 1 amino acid variation) in the framework regions as compared with the VL as set forth in SEQ ID NO: 8.

[0344] In some embodiments, the anti-TfR antibody of the present disclosure comprises a humanized VH comprising a CDR-H1 having the amino acid sequence of SEQ ID NO: 150 (according to the Chothia definition system), a CDR-H2 having the amino acid sequence of SEQ ID NO: 151, SEQ ID NO: 739, or SEQ ID NO: 740 (according to the Chothia definition system), a CDR-H3 having the amino acid sequence of SEQ ID NO: 152 (according to the Chothia definition system), and is at least 75% (e.g., 75%, 80%, 85%, 90%, 95%, 98%, or 99%) identical in the framework regions to the VH as set forth in SEQ ID NO: 7. Alternatively or in addition (e.g., in addition), the anti-TfR antibody of the present disclosure comprises a humanized VL comprising a CDR-L1 having the amino acid sequence of SEQ ID NO: 153 (according to the Chothia definition system), a CDR-L2 having the amino acid sequence of SEQ ID NO: 5 (according to the Chothia definition system), and a CDR-L3 having the amino acid sequence of SEQ ID NO: 154 (according to the Chothia definition system), and is at least 75% (e.g., 75%, 80%, 85%, 90%, 95%, 98%, or 99%) identical in the framework regions to the VL as set forth in SEQ ID NO: 8.

[0345] In some embodiments, the anti-TfR antibody of the present disclosure comprises a humanized VH comprising a CDR-H1 having the amino acid sequence of SEQ ID NO: 9 (according to the IMGT definition system), a CDR-H2 having the amino acid sequence of SEQ ID NO: 10 (according to the IMGT definition system), a CDR-H3 having the amino acid sequence of SEQ ID NO: 11 (according to the IMGT definition system), and containing no more than 25 amino acid variations (e.g., no more than 25, 24, 23, 22, 21, 20, 19, 18, 17, 16, 15, 14, 13, 12, 11, 10, 9, 8, 7, 6, 5, 4, 3, 2, or 1 amino acid variation) in the framework regions as compared with the VH as set forth in SEQ ID NO: 15. Alternatively or in addition (e.g., in addition), the anti-TfR antibody of the present disclosure comprises a humanized VL comprising a CDR-L1 having the amino acid sequence of SEQ ID NO: 12 (according to the IMGT definition system), a CDR-L2 having the amino acid sequence of SEQ ID NO: 13 (according to the IMGT definition system), and a CDR-L3 having the amino acid sequence of SEQ ID NO: 14 (according to the IMGT definition system), and containing no more than 25 amino acid variations (e.g., no more than 25, 24, 23, 22, 21, 20, 19, 18, 17, 16, 15, 14, 13, 12, 11, 10, 9, 8, 7, 6, 5, 4, 3, 2, or 1 amino acid variation) in the framework regions as compared with the VL as set forth in SEQ ID NO: 16.

[0346] In some embodiments, the anti-TfR antibody of the present disclosure comprises a humanized VH comprising a CDR-H1 having the amino acid sequence of SEQ ID NO: 9 (according to the IMGT definition system), a CDR-H2 having the amino acid sequence of SEQ ID NO: 10 (according to the IMGT definition system), a CDR-H3 having the amino acid sequence of SEQ ID NO: 11 (according to the IMGT definition system), and is at least 75% (e.g., 75%, 80%, 85%, 90%, 95%, 98%, or 99%) identical in the framework regions to the VH as set forth in SEQ ID NO: 15. Alternatively or in addition (e.g., in addition), the anti-TfR antibody of the present disclosure comprises a humanized VL comprising a CDR-L1 having the amino acid sequence of SEQ ID NO: 12 (according to the IMGT definition system), a CDR-L2 having the amino acid sequence of SEQ ID NO: 13 (according to the IMGT definition system), and a CDR-L3 having the amino acid sequence of SEQ ID NO: 14 (according to the IMGT definition system), and is at least 75% (e.g., 75%, 80%, 85%, 90%, 95%, 98%, or 99%) identical in the framework regions to the VL as set forth SEQ ID NO: 16.

[0347] In some embodiments, the anti-TfR antibody of the present disclosure comprises a humanized VH comprising a CDR-H1 having the amino acid sequence of SEQ ID NO: 155 (according to the Kabat definition system), a CDR-H2 having the amino acid sequence of SEQ ID NO: 156 (according to the Kabat definition system), a CDR-H3 having the amino acid sequence of SEQ ID NO: 157 (according to the Kabat definition system), and containing no more than 25 amino acid variations (e.g., no more than 25, 24, 23, 22, 21, 20, 19, 18, 17, 16, 15, 14, 13, 12, 11, 10, 9, 8, 7, 6, 5, 4, 3, 2, or 1 amino acid variation) in the framework regions as compared with the VH as set forth in SEQ ID NO: 15. Alternatively or in addition (e.g., in addition), the anti-TfR antibody of the present disclosure comprises a humanized VL comprising a CDR-L1 having the amino acid sequence of SEQ ID NO: 158 (according to the Kabat definition system), a CDR-L2 having the amino acid sequence of SEQ ID NO: 159 (according to the Kabat definition system), and a CDR-L3 having the amino acid sequence of SEQ ID NO: 14 (according to the Kabat definition system), and containing no more than 25 amino acid variations (e.g., no more than 25, 24, 23, 22, 21, 20, 19, 18, 17, 16, 15, 14, 13, 12, 11, 10, 9, 8, 7, 6, 5, 4, 3, 2, or 1 amino acid variation) in the framework regions as compared with the VL as set forth in SEQ ID NO: 16.

[0348] In some embodiments, the anti-TfR antibody of the present disclosure comprises a humanized VH comprising a CDR-H1 having the amino acid sequence of SEQ ID NO: 155 (according to the Kabat definition system), a CDR-H2 having the amino acid sequence of SEQ ID NO: 156 (according to the Kabat definition system), a CDR-H3 having the amino acid sequence of SEQ ID NO: 157 (according to the Kabat definition system), and is at least 75% (e.g., 75%, 80%, 85%, 90%, 95%, 98%, or 99%) identical in the framework regions to the VH as set forth in SEQ ID NO: 15. Alternatively or in addition (e.g., in addition), the anti-TfR antibody of the present disclosure comprises a humanized VL comprising a CDR-L1 having the amino acid sequence of SEQ ID NO: 158 (according to the Kabat definition system), a CDR-L2 having the amino acid sequence of SEQ ID NO: 159 (according to the Kabat definition system), and a CDR-L3 having the amino acid sequence of SEQ ID NO: 14 (according to the Kabat definition system), and is at least 75% (e.g., 75%, 80%, 85%, 90%, 95%, 98%, or 99%) identical in the framework regions to the VL as set forth in SEQ ID NO: 16.

[0349] In some embodiments, the anti-TfR antibody of the present disclosure comprises a humanized VH comprising a CDR-H1 having the amino acid sequence of SEQ ID NO: 160 (according to the Chothia definition system), a CDR-H2 having the amino acid sequence of SEQ ID NO: 161 (according to the Chothia definition system), a CDR-H3 having the amino acid sequence of SEQ ID NO: 162 (according to the Chothia definition system), and containing no more than 25 amino acid variations (e.g., no more than 25, 24, 23, 22, 21, 20, 19, 18, 17, 16, 15, 14, 13, 12, 11, 10, 9, 8, 7, 6, 5, 4, 3, 2, or 1 amino acid variation) in the framework regions as compared with the VH as set forth in SEQ ID NO: 15. Alternatively or in addition (e.g., in addition), the anti-TfR antibody of the present disclosure comprises a humanized VL comprising a CDR-L1 having the amino acid sequence of SEQ ID NO: 163 (according to the Chothia definition system), a CDR-L2 having the amino acid sequence of SEQ ID NO: 13 (according to the Chothia definition system), and a CDR-L3 having the amino acid sequence of SEQ ID NO: 164 (according to the Chothia definition system), and containing no more than 25 amino acid variations (e.g., no more than 25, 24, 23, 22, 21, 20, 19, 18, 17, 16, 15, 14, 13, 12, 11, 10, 9, 8, 7, 6, 5, 4, 3, 2, or 1 amino acid variation) in the framework regions as compared with the VL as set forth in SEQ ID NO: 16.

[0350] In some embodiments, the anti-TfR antibody of the present disclosure comprises a humanized VH comprising a CDR-H1 having the amino acid sequence of SEQ ID NO: 160 (according to the Chothia definition system), a CDR-H2 having the amino acid sequence of SEQ ID NO: 161 (according to the Chothia definition system), a CDR-H3 having the amino acid sequence of SEQ ID NO: 162 (according to the Chothia definition system), and is at least 75% (e.g., 75%, 80%, 85%, 90%, 95%, 98%, or 99%) identical in the framework regions to the VH as set forth in SEQ ID NO: 15. Alternatively or in addition (e.g., in addition), the anti-TfR antibody of the present disclosure comprises a humanized VL comprising a CDR-L1 having the amino acid sequence of SEQ ID NO: 163 (according to the Chothia definition system), a CDR-L2 having the amino acid sequence of SEQ ID NO: 13 (according to the Chothia definition system), and a CDR-L3 having the amino acid sequence of SEQ ID NO: 164 (according to the Chothia definition system), and is at least 75% (e.g., 75%, 80%, 85%, 90%, 95%, 98%, or 99%) identical in the framework regions to the VL as set forth in SEQ ID NO: 16.

[0351] In some embodiments, the anti-TfR antibody of the present disclosure comprises a humanized VH comprising a CDR-H1 having the amino acid sequence of SEQ ID NO: 17, SEQ ID NO: 735, or SEQ ID NO: 737 (according to the IMGT definition system), a CDR-H2 having the amino acid sequence of SEQ ID NO: 18 (according to the IMGT definition system), a CDR-H3 having the amino acid sequence of SEQ ID NO: 19 (according to the IMGT definition system), and containing no more than 25 amino acid variations (e.g., no more than 25, 24, 23, 22, 21, 20, 19, 18, 17, 16, 15, 14, 13, 12, 11, 10, 9, 8, 7, 6, 5, 4, 3, 2, or 1 amino acid variation) in the framework regions as compared with the VH as set forth in SEQ ID NO: 23. Alternatively or in addition (e.g., in addition), the anti-TfR antibody of the present disclosure comprises a humanized VL comprising a CDR-L1 having the amino acid sequence of SEQ ID NO: 20 (according to the IMGT definition system), a CDR-L2 having the amino acid sequence of SEQ ID NO: 21 (according to the IMGT definition system), and a CDR-L3 having the amino acid sequence of SEQ ID NO: 22 (according to the IMGT definition system), and containing no more than 25 amino acid variations (e.g., no more than 25, 24, 23, 22, 21, 20, 19, 18, 17, 16, 15, 14, 13, 12, 11, 10, 9, 8, 7, 6, 5, 4, 3, 2, or 1 amino acid variation) in the framework regions as compared with the VL as set forth in SEQ ID NO: 24.

[0352] In some embodiments, the anti-TfR antibody of the present disclosure comprises a humanized VH comprising a CDR-H1 having the amino acid sequence of SEQ ID NO: 17, SEQ ID NO: 735, or SEQ ID NO: 737 (according to the IMGT definition system), a CDR-H2 having the amino acid sequence of SEQ ID NO: 18 (according to the IMGT definition system), a CDR-H3 having the amino acid sequence of SEQ ID NO: 19 (according to the IMGT definition system), and is at least 75% (e.g., 75%, 80%, 85%, 90%, 95%, 98%, or 99%) identical in the framework regions to the VH as set forth in SEQ ID NO: 23. Alternatively or in addition (e.g., in addition), the anti-TfR antibody of the present disclosure comprises a humanized VL comprising a CDR-L1 having the amino acid sequence of SEQ ID NO: 20 (according to the IMGT definition system), a CDR-L2 having the amino acid sequence of SEQ ID NO: 21 (according to the IMGT definition system), and a CDR-L3 having the amino acid sequence of SEQ ID NO: 22 (according to the IMGT definition system), and is at least 75% (e.g., 75%, 80%, 85%, 90%, 95%, 98%, or 99%) identical in the framework regions to the VL as set forth in SEQ ID NO: 24.

[0353] In some embodiments, the anti-TfR antibody of the present disclosure comprises a humanized VH comprising a CDR-H1 having the amino acid sequence of SEQ ID NO: 165, SEQ ID NO: 736, or SEQ ID NO: 738 (according to the Kabat definition system), a CDR-H2 having the amino acid sequence of SEQ ID NO: 166 (according to the Kabat definition system), a CDR-H3 having the amino acid sequence of SEQ ID NO: 167 (according to the Kabat definition system), and containing no more than 25 amino acid variations (e.g., no more than 25, 24, 23, 22, 21, 20, 19, 18, 17, 16, 15, 14, 13, 12, 11, 10, 9, 8, 7, 6, 5, 4, 3, 2, or 1 amino acid variation) in the framework regions as compared with the VH as set forth in SEQ ID NO: 23. Alternatively or in addition (e.g., in addition), the anti-TfR antibody of the present disclosure comprises a humanized VL comprising a CDR-L1 having the amino acid sequence of SEQ ID NO: 168 (according to the Kabat definition system), a CDR-L2 having the amino acid sequence of SEQ ID NO: 169 (according to the Kabat definition system), and a CDR-L3 having the amino acid sequence of SEQ ID NO: 22 (according to the Kabat definition system), and containing no more than 25 amino acid variations (e.g., no more than 25, 24, 23, 22, 21, 20, 19, 18, 17, 16, 15, 14, 13, 12, 11, 10, 9, 8, 7, 6, 5, 4, 3, 2, or 1 amino acid variation) in the framework regions as compared with the VL as set forth in SEQ ID NO: 24.

[0354] In some embodiments, the anti-TfR antibody of the present disclosure comprises a humanized VH comprising a CDR-H1 having the amino acid sequence of SEQ ID NO: 165, SEQ ID NO: 736, or SEQ ID NO: 738 (according to the Kabat definition system), a CDR-H2 having the amino acid sequence of SEQ ID NO: 166 (according to the Kabat definition system), a CDR-H3 having the amino acid sequence of SEQ ID NO: 167 (according to the Kabat definition system), and is at least 75% (e.g., 75%, 80%, 85%, 90%, 95%, 98%, or 99%) identical in the framework regions to the VH as set forth in SEQ ID NO: 23. Alternatively or in addition (e.g., in addition), the anti-TfR antibody of the present disclosure comprises a humanized VL comprising a CDR-L1 having the amino acid sequence of SEQ ID NO: 168 (according to the Kabat definition system), a CDR-L2 having the amino acid sequence of SEQ ID NO: 169 (according to the Kabat definition system), and a CDR-L3 having the amino acid sequence of SEQ ID NO: 22 (according to the Kabat definition system), and is at least 75% (e.g., 75%, 80%, 85%, 90%, 95%, 98%, or 99%) identical in the framework regions to the VL as set forth in SEQ ID NO: 24.

[0355] In some embodiments, the anti-TfR antibody of the present disclosure comprises a humanized VH comprising a CDR-H1 having the amino acid sequence of SEQ ID NO: 170 (according to the Chothia definition system), a CDR-H2 having the amino acid sequence of SEQ ID NO: 171 (according to the Chothia definition system), a CDR-H3 having the amino acid sequence of SEQ ID NO: 172 (according to the Chothia definition system), and containing no more than 25 amino acid variations (e.g., no more than 25, 24, 23, 22, 21, 20, 19, 18, 17, 16, 15, 14, 13, 12, 11, 10, 9, 8, 7, 6, 5, 4, 3, 2, or 1 amino acid variation) in the framework regions as compared with the VH as set forth in SEQ ID NO: 23. Alternatively or in addition (e.g., in addition), the anti-TfR antibody of the present disclosure comprises a humanized VL comprising a CDR-L1 having the amino acid sequence of SEQ ID NO: 173 (according to the Chothia definition system), a CDR-L2 having the amino acid sequence of SEQ ID NO: 21 (according to the Chothia definition system), and a CDR-L3 having the amino acid sequence of SEQ ID NO: 174 (according to the Chothia definition system), and containing no more than 25 amino acid variations (e.g., no more than 25, 24, 23, 22, 21, 20, 19, 18, 17, 16, 15, 14, 13, 12, 11, 10, 9, 8, 7, 6, 5, 4, 3, 2, or 1 amino acid variation) in the framework regions as compared with the VL as set forth in SEQ ID NO: 24.

[0356] In some embodiments, the anti-TfR antibody of the present disclosure comprises a humanized VH comprising a CDR-H1 having the amino acid sequence of SEQ ID NO: 170 (according to the Chothia definition system), a CDR-H2 having the amino acid sequence of SEQ ID NO: 171 (according to the Chothia definition system), a CDR-H3 having the amino acid sequence of SEQ ID NO: 172 (according to the Chothia definition system), and is at least 75% (e.g., 75%, 80%, 85%, 90%, 95%, 98%, or 99%) identical in the framework regions to the VH as set forth in SEQ ID NO: 23. Alternatively or in addition (e.g., in addition), the anti-TfR antibody of the present disclosure comprises a humanized VL comprising a CDR-L1 having the amino acid sequence of SEQ ID NO: 173 (according to the Chothia definition system), a CDR-L2 having the amino acid sequence of SEQ ID NO: 21 (according to the Chothia definition system), and a CDR-L3 having the amino acid sequence of SEQ ID NO: 174 (according to the Chothia definition system), and is at least 75% (e.g., 75%, 80%, 85%, 90%, 95%, 98%, or 99%) identical in the framework regions to the VL as set forth in SEQ ID NO: 24.

[0357] In some embodiments, the anti-TfR antibody of the present disclosure is a chimeric antibody, which can include a heavy constant region and a light constant region from a human antibody. Chimeric antibodies refer to antibodies having a variable region or part of variable region from a first species and a constant region from a second species. Typically, in these chimeric antibodies, the variable region of both light and heavy chains mimics the variable regions of antibodies derived from one species of mammals (e.g., a non-human mammal such as mouse, rabbit, and rat), while the constant portions are homologous to the sequences in antibodies derived from another mammal such as human. In some embodiments, amino acid modifications can be made in the variable region and/or (e.g., and) the constant region.

[0358] In some embodiments, the anti-TfR antibody described herein is a chimeric antibody, which can include a heavy constant region and a light constant region from a human antibody. Chimeric antibodies refer to antibodies having a variable region or part of variable region from a first species and a constant region from a second species. Typically, in these chimeric antibodies, the variable region of both light and heavy chains mimics the variable regions of antibodies derived from one species of mammals (e.g., a non-human mammal such as mouse, rabbit, and rat), while the constant portions are homologous to the sequences in antibodies derived from another mammal such as human. In some embodiments, amino acid modifications can be made in the variable region and/or (e.g., and) the constant region.

[0359] In some embodiments, the heavy chain of any of the anti-TfR antibodies as described herein may comprises a heavy chain constant region (CH) or a portion thereof (e.g., CH1, CH2, CH3, or a combination thereof). The heavy chain constant region can of any suitable origin, e.g., human, mouse, rat, or rabbit. In one specific example, the heavy chain constant region is from a human IgG (a gamma heavy chain), e.g., IgG1, IgG2, or IgG4. An example of a human IgG1 constant region is given below:

(SEQ ID NO: 175)
ASTKGPSVFPLAPSSKSTSGGTAALGCLVKDYFPEPVTVSW
NSGALTSGVHTFPAVLQSSGLYSLSSVVTVPSSSLGTQTYI
CNVNHKPSNTKVDKKVEPKSCDKTHTCPPCPAPELLGGPSV
FLFPPKPKDTLMISRTPEVTCVVVDVSHEDPEVKFNWYVDG
VEVHNAKTKPREEQYNSTYRVVSVLTVLHQDWLNGKEYKCK
VSNKALPAPIEKTISKAKGQPREPQVYTLPPSRDELTKNQV
SLTCLVKGFYPSDIAVEWESNGQPENNYKTTPPVLDSDGSF
FLYSKLTVDKSRWQQGNVFSCSVMHEALHNHYTQKSLSLSP
GK

[0360] In some embodiments, the heavy chain of any of the anti-TfR antibodies described herein comprises a mutant human IgG1 constant region. For example, the introduction of LALA mutations (a mutant derived from mAb b12 that has been mutated to replace the lower hinge residues Leu234 Leu235 with Ala234 and Ala235) in the CH2 domain of human IgG1 is known to reduce Fcg receptor binding (Bruhns, P., et al. (2009) and Xu, D. et al. (2000)). The mutant human IgG1 constant region is provided below (mutations bonded and underlined):

(SEQ ID NO: 176)
ASTKGPSVFPLAPSSKSTSGGTAALGCLVKDYFPEPVTVSWNSGALT
SGVHTFPAVLQSSGLYSLSSVVTVPSSSLGTQTYICNVNHKPSNTKV
DKKVEPKSCDKTHTCPPCPAPEAAGGPSVFLFPPKPKDTLMISRTPE
VTCVVVDVSHEDPEVKFNWYVDGVEVHNAKTKPREEQYNSTYRVVSV
LTVLHQDWLNGKEYKCKVSNKALPAPIEKTISKAKGQPREPQVYTLP
PSRDELTKNQVSLTCLVKGFYPSDIAVEWESNGQPENNYKTTPPVLD
SDGSFFLYSKLTVDKSRWQQGNVFSCSVMHEALHNHYTQKSLSLSPG
K

[0361] In some embodiments, the light chain of any of the anti-TfR antibodies described herein may further comprise a light chain constant region (CL), which can be any CL known in the art. In some examples, the CL is a kappa light chain. In other examples, the CL is a lambda light chain. In some embodiments, the CL is a kappa light chain, the sequence of which is provided below:

(SEQ ID NO: 177)
[sequence omitted]

[0362] Other antibody heavy and light chain constant regions are well known in the art, e.g., those provided in the IMGT database (www.imgt.org) or at www.vbase2.org/vbstat.php., both of which are incorporated by reference herein.

[0363] In some embodiments, the anti-TfR antibody described herein comprises a heavy chain comprising any one of the VH as listed in Table 2 or any variants thereof and a heavy chain constant region that is at least 80%, at least 85%, at least 90%, at least 95%, or at least 99% identical to SEQ ID NO: 175 or SEQ ID NO: 176. In some embodiments, the anti-TfR antibody described herein comprises a heavy chain comprising any one of the VH as listed in Table 2 or any variants thereof and a heavy chain constant region that contains no more than 25 amino acid variations (e.g., no more than 25, 24, 23, 22, 21, 20, 19, 18, 17, 16, 15, 14, 13, 12, 11, 10, 9, 8, 7, 6, 5, 4, 3, 2, or 1 amino acid variation) as compared with SEQ ID NO: 175 or SEQ ID NO: 176. In some embodiments, the anti-TfR antibody described herein comprises a heavy chain comprising any one of the VH as listed in Table 2 or any variants thereof and a heavy chain constant region as set forth in SEQ ID NO: 175. In some embodiments, the anti-TfR antibody described herein comprises heavy chain comprising any one of the VH as listed in Table 2 or any variants thereof and a heavy chain constant region as set forth in SEQ ID NO: 176.

[0364] In some embodiments, the anti-TfR antibody described herein comprises a light chain comprising any one of the VL as listed in Table 2 or any variants thereof and a light chain constant region that is at least 80%, at least 85%, at least 90%, at least 95%, or at least 99% identical to SEQ ID NO: 177. In some embodiments, the anti-TfR antibody described herein comprises a light chain comprising any one of the VL as listed in Table 2 or any variants thereof and a light chain constant region contains no more than 25 amino acid variations (e.g., no more than 25, 24, 23, 22, 21, 20, 19, 18, 17, 16, 15, 14, 13, 12, 11, 10, 9, 8, 7, 6, 5, 4, 3, 2, or 1 amino acid variation) as compared with SEQ ID NO: 177. In some embodiments, the anti-TfR antibody described herein comprises a light chain comprising any one of the VL as listed in Table 2 or any variants thereof and a light chain constant region set forth in SEQ ID NO: 177.

[0365] Examples of IgG heavy chain and light chain amino acid sequences of the anti-TfR antibodies described are provided in Table 5 below.

TABLE 5
Heavy chain and light chain sequences of examples of anti-TfR IgGs

| Antibody | IgG Heavy Chain/Light Chain Sequences |
|---|---|
| 3-A4 | Heavy Chain (with wild type human IgG1 constant region) |
| | EVQLQQSGAELVRPGASVKLSCTASGFNIKDDYMYWVKQRPEQGLEWIGWIDPENGDTEYAS |
| | KFQDKATVTADTSSNTAYLQLSSLTSEDTAVYYCTLWLRRGLDYWGQGTSVTVSSASTKGPS |
| | VFPLAPSSKSTSGGTAALGCLVKDYFPEPVTVSWNSGALTSGVHTFPAVLQSSGLYSLSSVV |
| | TVPSSSLGTQTYICNVNHKPSNTKVDKKVEPKSCDKTHTCPPCPAPELLGGPSVFLFPPKPK |
| | DTLMISRTPEVTCVVVDVSHEDPEVKFNWYVDGVEVHNAKTKPREEQYNSTYRVVSVLTVLH |
| | QDWLNGKEYKCKVSNKALPAPIEKTISKAKGQPREPQVYTLPPSRDELTKNQVSLTCLVKGF |
| | YPSDIAVEWESNGQPENNYKTTPPVLDSDGSFFLYSKLTVDKSRWQQGNVFSCSVMHEALHN |
| | HYTQKSLSLSPGK (SEQ ID NO: 178) |
| | Light Chain (with kappa light chain constant region) |
| | DIVMTQAAPSVPVTPGESVSISCRSSKSLLHSNGYTYLFWFLQRPGQSPQLLIYRMSNLASG |
| | VPDRFSGSGSGTAFTLRISRVEAEDVGVYYCMQHLEYPFTFGGGTKLEIKRTVAAPSVFIFP |
| | PSDEQLKSGTASVVCLLNNFYPREAKVQWKVDNALQSGNSQESVTEQDSKDSTYSLSSTLTL |
| | SKADYEKHKVYACEVTHQGLSSPVTKSFNRGEC (SEQ ID NO: 179) |
| 3-A4 | Heavy Chain (with wild type human IgG1 constant region) |
| Variant 1 | EVQLQQSGAELVRPGASVKLSCTASGFNIKDDYMYWVKQRPEQGLEWIGWIDPETGDTEYAS |
| | KFQDKATVTADTSSNTAYLQLSSLTSEDTAVYYCTLWLRRGLDYWGQGTSVTVSSASTKGPS |
| | VFPLAPSSKSTSGGTAALGCLVKDYFPEPVTVSWNSGALTSGVHTFPAVLQSSGLYSLSSVV |
| | TVPSSSLGTQTYICNVNHKPSNTKVDKKVEPKSCDKTHTCPPCPAPELLGGPSVFLFPPKPK |
| | DTLMISRTPEVTCVVVDVSHEDPEVKFNWYVDGVEVHNAKTKPREEQYNSTYRVVSVLTVLH |
| | QDWLNGKEYKCKVSNKALPAPIEKTISKAKGQPREPQVYTLPPSRDELTKNQVSLTCLVKGF |
| | YPSDIAVEWESNGQPENNYKTTPPVLDSDGSFFLYSKLTVDKSRWQQGNVFSCSVMHEALHN |
| | HYTQKSLSLSPGK (SEQ ID NO: 769) |
| | Light Chain (with kappa light chain constant region) |
| | DIVMTQAAPSVPVTPGESVSISCRSSKSLLHSNGYTYLFWFLQRPGQSPQLLIYRMSNLASG |
| | VPDRFSGSGSGTAFTLRISRVEAEDVGVYYCMQHLEYPFTFGGGTKLEIKRTVAAPSVFIFP |
| | PSDEQLKSGTASVVCLLNNFYPREAKVQWKVDNALQSGNSQESVTEQDSKDSTYSLSSTLTL |
| | SKADYEKHKVYACEVTHQGLSSPVTKSFNRGEC (SEQ ID NO: 179) |
| 3-A4 | Heavy Chain (with wild type human IgG1 constant region) |
| Variant 2 | EVQLQQSGAELVRPGASVKLSCTASGFNIKDDYMYWVKQRPEQGLEWIGWIDPESGDTEYAS |
| | KFQDKATVTADTSSNTAYLQLSSLTSEDTAVYYCTLWLRRGLDYWGQGTSVTVSSASTKGPS |
| | VFPLAPSSKSTSGGTAALGCLVKDYFPEPVTVSWNSGALTSGVHTFPAVLQSSGLYSLSSVV |
| | TVPSSSLGTQTYICNVNHKPSNTKVDKKVEPKSCDKTHTCPPCPAPELLGGPSVFLFPPKPK |
| | DTLMISRTPEVTCVVVDVSHEDPEVKFNWYVDGVEVHNAKTKPREEQYNSTYRVVSVLTVLH |
| | QDWLNGKEYKCKVSNKALPAPIEKTISKAKGQPREPQVYTLPPSRDELTKNQVSLTCLVKGF |
| | YPSDIAVEWESNGQPENNYKTTPPVLDSDGSFFLYSKLTVDKSRWQQGNVFSCSVMHEALHN |
| | HYTQKSLSLSPGK (SEQ ID NO: 770) |
| | Light Chain (with kappa light chain constant region) |
| | DIVMTQAAPSVPVTPGESVSISCRSSKSLLHSNGYTYLFWFLQRPGQSPQLLIYRMSNLASG |
| | VPDRFSGSGSGTAFTLRISRVEAEDVGVYYCMQHLEYPFTFGGGTKLEIKRTVAAPSVFIFP |
| | PSDEQLKSGTASVVCLLNNFYPREAKVQWKVDNALQSGNSQESVTEQDSKDSTYSLSSTLTL |
| | SKADYEKHKVYACEVTHQGLSSPVTKSFNRGEC (SEQ ID NO: 179) |
| 3-M12 | Heavy Chain (with wild type human IgG1 constant region) |
| | DVQLQESGPGLVKPSQSLSLTCSVTGYSITSGYYWNWIRQFPGNKLEWMGYITFDGANNYNP |
| | SLKNRISITRDTSKNQFFLKLTSVTTEDTATYYCTRSSYDYDVLDYWGQGTTLTVSSASTKG |
| | PSVFPLAPSSKSTSGGTAALGCLVKDYFPEPVTVSWNSGALTSGVHTFPAVLQSSGLYSLSS |
| | VVTVPSSSLGTQTYICNVNHKPSNTKVDKKVEPKSCDKTHTCPPCPAPELLGGPSVFLFPPK |
| | PKDTLMISRTPEVTCVVVDVSHEDPEVKFNWYVDGVEVHNAKTKPREEQYNSTYRVVSVLTV |
| | LHQDWLNGKEYKCKVSNKALPAPIEKTISKAKGQPREPQVYTLPPSRDELTKNQVSLTCLVK |
| | GFYPSDIAVEWESNGQPENNYKTTPPVLDSDGSFFLYSKLTVDKSRWQQGNVFSCSVMHEAL |
| | HNHYTQKSLSLSPGK (SEQ ID NO: 180) |
| | Light Chain (with kappa light chain constant region) |
| | DIQMTQTTSSLSASLGDRVTISCRASQDISNFLNWYQQRPDGTVKLLIYYTSRLHSGVPSRF |
| | SGSGSGTDFSLTVSNLEQEDIATYFCQQGHTLPYTFGGGTKLEIKRTVAAPSVFIFPPSDEQ |
| | LKSGTASVVCLLNNFYPREAKVQWKVDNALQSGNSQESVTEQDSKDSTYSLSSTLTLSKADY |
| | EKHKVYACEVTHQGLSSPVTKSFNRGEC (SEQ ID NO: 181) |
| 5-H12 | Heavy Chain (with wild type human IgG1 constant region) |
| | QIQLQQSGPELVRPGASVKISCKASGYSFTDYCINWVNQRPGQGLEWIGWIYPGSGNTRYSE |
| | RFKGKATLTVDTSSNTAYMQLSSLTSEDSAVYFCAREDYYPYHGMDYWGQGTSVTVSSASTK |
| | GPSVFPLAPSSKSTSGGTAALGCLVKDYFPEPVTVSWNSGALTSGVHTFPAVLQSSGLYSLS |
| | SVVTVPSSSLGTQTYICNVNHKPSNTKVDKKVEPKSCDKTHTCPPCPAPELLGGPSVFLFPP |
| | KPKDTLMISRTPEVTCVVVDVSHEDPEVKFNWYVDGVEVHNAKTKPREEQYNSTYRVVSVLT |
| | VLHQDWLNGKEYKCKVSNKALPAPIEKTISKAKGQPREPQVYTLPPSRDELTKNQVSLTCLV |
| | KGFYPSDIAVEWESNGQPENNYKTTPPVLDSDGSFFLYSKLTVDKSRWQQGNVFSCSVMHEA |
| | LHNHYTQKSLSLSPGK (SEQ ID NO: 182) |
| | Light Chain (with kappa light chain constant region) |
| | DIVLTQSPTSLAVSLGQRATISCRASESVDGYDNSFMHWYQQKPGQPPKLLIFRASNLESGI |
| | PARFSGSGSRTDFTLTINPVEAADVATYYCQQSSEDPWTFGGGTKLEIKRTVAAPSVFIFPP |
| | SDEQLKSGTASVVCLLNNFYPREAKVQWKVDNALQSGNSQESVTEQDSKDSTYSLSSTLTLS |
| | KADYEKHKVYACEVTHQGLSSPVTKSFNRGEC (SEQ ID NO: 183) |
| 5-H12 | Heavy Chain (with wild type human IgG1 constant region) |
| Variant 1 | QIQLQQSGPELVRPGASVKISCKASGYSFTDYYINWVNQRPGQGLEWIGWIYPGSGNTRYSE |
| | RFKGKATLTVDTSSNTAYMQLSSLTSEDSAVYFCAREDYYPYHGMDYWGQGTSVTVSSASTK |
| | GPSVFPLAPSSKSTSGGTAALGCLVKDYFPEPVTVSWNSGALTSGVHTFPAVLQSSGLYSLS |
| | SVVTVPSSSLGTQTYICNVNHKPSNTKVDKKVEPKSCDKTHTCPPCPAPELLGGPSVFLFPP |
| | KPKDTLMISRTPEVTCVVVDVSHEDPEVKFNWYVDGVEVHNAKTKPREEQYNSTYRVVSVLT |
| | VLHQDWLNGKEYKCKVSNKALPAPIEKTISKAKGQPREPQVYTLPPSRDELTKNQVSLTCLV |
| | KGFYPSDIAVEWESNGQPENNYKTTPPVLDSDGSFFLYSKLTVDKSRWQQGNVFSCSVMHEA |
| | LHNHYTQKSLSLSPGK (SEQ ID NO: 771) |
| | Light Chain (with kappa light chain constant region) |
| | DIVLTQSPTSLAVSLGQRATISCRASESVDGYDNSFMHWYQQKPGQPPKLLIFRASNLESGI |
| | PARFSGSGSRTDFTLTINPVEAADVATYYCQQSSEDPWTFGGGTKLEIKRTVAAPSVFIFPP |
| | SDEQLKSGTASVVCLLNNFYPREAKVQWKVDNALQSGNSQESVTEQDSKDSTYSLSSTLTLS |
| | KADYEKHKVYACEVTHQGLSSPVTKSFNRGEC (SEQ ID NO: 183) |
| 5-H12 | Heavy Chain (with wild type human IgG1 constant region) |
| Variant 2 | QIQLQQSGPELVRPGASVKISCKASGYSFTDYDINWVNQRPGQGLEWIGWIYPGSGNTRYSE |
| | RFKGKATLTVDTSSNTAYMQLSSLTSEDSAVYFCAREDYYPYHGMDYWGQGTSVTVSSASTK |
| | GPSVFPLAPSSKSTSGGTAALGCLVKDYFPEPVTVSWNSGALTSGVHTFPAVLQSSGLYSLS |
| | SVVTVPSSSLGTQTYICNVNHKPSNTKVDKKVEPKSCDKTHTCPPCPAPELLGGPSVFLFPP |
| | KPKDTLMISRTPEVTCVVVDVSHEDPEVKFNWYVDGVEVHNAKTKPREEQYNSTYRVVSVLT |
| | VLHQDWLNGKEYKCKVSNKALPAPIEKTISKAKGQPREPQVYTLPPSRDELTKNQVSLTCLV |
| | KGFYPSDIAVEWESNGQPENNYKTTPPVLDSDGSFFLYSKLTVDKSRWQQGNVFSCSVMHEA |
| | LHNHYTQKSLSLSPGK (SEQ ID NO: 772) |
| | Light Chain (with kappa light chain constant region) |
| | DIVLTQSPTSLAVSLGQRATISCRASESVDGYDNSFMHWYQQKPGQPPKLLIFRASNLESGI |
| | PARFSGSGSRTDFTLTINPVEAADVATYYCQQSSEDPWTFGGGTKLEIKRTVAAPSVFIFPP |
| | SDEQLKSGTASVVCLLNNFYPREAKVQWKVDNALQSGNSQESVTEQDSKDSTYSLSSTLTLS |
| | KADYEKHKVYACEVTHQGLSSPVTKSFNRGEC (SEQ ID NO: 183) |

* VH/VL sequences underlined

[0366] In some embodiments, the anti-TfR antibody of the present disclosure comprises a heavy chain containing no more than 25 amino acid variations (e.g., no more than 25, 24, 23, 22, 21, 20, 19, 18, 17, 16, 15, 14, 13, 12, 11, 10, 9, 8, 7, 6, 5, 4, 3, 2, or 1 amino acid variation) as compared with the heavy chain as set forth in SEQ ID NO: 178, SEQ ID NO: 180, SEQ ID NO: 182, SEQ ID NO: 769, SEQ ID NO: 770, SEQ ID NO: 771, or SEQ ID NO: 772. Alternatively or in addition (e.g., in addition), the anti-TfR antibody of the present disclosure comprises a light chain containing no more than 25 amino acid variations (e.g., no more than 25, 24, 23, 22, 21, 20, 19, 18, 17, 16, 15, 14, 13, 12, 11, 10, 9, 8, 7, 6, 5, 4, 3, 2, or 1 amino acid variation) as compared with the light chain as set forth in SEQ ID NO: 179, SEQ ID NO: 181, or SEQ ID NO: 183. In some embodiments, the anti-TfR antibody described herein comprises a heavy chain comprising an amino acid sequence that is at least 75% (e.g., 75%, 80%, 85%, 90%, 95%, 98%, or 99%) identical to SEQ ID NO: 178, SEQ ID NO: 180, SEQ ID NO: 182, SEQ ID NO: 769, SEQ ID NO: 770, SEQ ID NO: 771, or SEQ ID NO: 772. Alternatively or in addition (e.g., in addition), the anti-TfR antibody described herein comprises a light chain comprising an amino acid sequence that is at least 75% (e.g., 75%, 80%, 85%, 90%, 95%, 98%, or 99%) identical to SEQ ID NO: 179, SEQ ID NO: 181, or SEQ ID NO: 183. In some embodiments, the anti-TfR antibody described herein comprises a heavy chain comprising the amino acid sequence of SEQ ID NO: 178, SEQ ID NO: 180, SEQ ID NO: 182, SEQ ID NO: 769, SEQ ID NO: 770, SEQ ID NO: 771, or SEQ ID NO: 772. Alternatively or in addition (e.g., in addition), the anti-TfR antibody described herein comprises a light chain comprising the amino acid sequence of SEQ ID NO: 179, SEQ ID NO: 181, or SEQ ID NO: 183.

[0367] In some embodiments, the anti-TfR antibody of the present disclosure comprises a heavy chain containing no more than 25 amino acid variations (e.g., no more than 25, 24, 23, 22, 21, 20, 19, 18, 17, 16, 15, 14, 13, 12, 11, 10, 9, 8, 7, 6, 5, 4, 3, 2, or 1 amino acid variation) as compared with the heavy chain as set forth in SEQ ID NO: 178, SEQ ID NO: 769, or SEQ ID NO: 770. Alternatively or in addition (e.g., in addition), the anti-TfR antibody of the present disclosure comprises a light chain containing no more than 25 amino acid variations (e.g., no more than 25, 24, 23, 22, 21, 20, 19, 18, 17, 16, 15, 14, 13, 12, 10, 11, 9, 8, 7, 6, 5, 4, 3, 2, or 1 amino acid variation) as compared with the light chain as set forth in SEQ ID NO: 179. In some embodiments, the anti-TfR antibody described herein comprises a heavy chain comprising an amino acid sequence that is at least 75% (e.g., 75%, 80%, 85%, 90%, 95%, 98%, or 99%) identical to SEQ ID NO: 178, SEQ ID NO: 769, or SEQ ID NO: 770. Alternatively or in addition (e.g., in addition), the anti-TfR antibody described herein comprises a light chain comprising an amino acid sequence that is at least 75% (e.g., 75%, 80%, 85%, 90%, 95%, 98%, or 99%) identical to SEQ ID NO: 179. In some embodiments, the anti-TfR antibody described herein comprises a heavy chain comprising the amino acid sequence of SEQ ID NO: 178, SEQ ID NO: 769, or SEQ ID NO: 770. Alternatively or in addition (e.g., in addition), the anti-TfR antibody described herein comprises a light chain comprising the amino acid sequence of SEQ ID NO: 179.

[0368] In some embodiments, the anti-TfR antibody of the present disclosure comprises a heavy chain containing no more than 25 amino acid variations (e.g., no more than 25, 24, 23, 22, 21, 20, 19, 18, 17, 16, 15, 14, 13, 12, 11, 10, 9, 8, 7, 6, 5, 4, 3, 2, or 1 amino acid variation) as compared with the heavy chain as set forth in SEQ ID NO: 180. Alternatively or in addition (e.g., in addition), the anti-TfR antibody of the present disclosure comprises a light chain containing no more than 25 amino acid variations (e.g., no more than 25, 24, 23, 22, 21, 20, 19, 18, 17, 16, 15, 14, 13, 12, 11, 10, 9, 8, 7, 6, 5, 4, 3, 2, or 1 amino acid variation) as compared with the light chain as set forth in SEQ ID NO: 181. In some embodiments, the anti-TfR antibody described herein comprises a heavy chain comprising an amino acid sequence that is at least 75% (e.g., 75%, 80%, 85%, 90%, 95%, 98%, or 99%) identical to SEQ ID NO: 180. Alternatively or in addition (e.g., in addition), the anti-TfR antibody described herein comprises a light chain comprising an amino acid sequence that is at least 75% (e.g., 75%, 80%, 85%, 90%, 95%, 98%, or 99%) identical to SEQ ID NO: 181. In some embodiments, the anti-TfR antibody described herein comprises a heavy chain comprising the amino acid sequence of SEQ ID NO: 180. Alternatively or in addition (e.g., in addition), the anti-TfR antibody described herein comprises a light chain comprising the amino acid sequence of SEQ ID NO: 181.

[0369] In some embodiments, the anti-TfR antibody of the present disclosure comprises a heavy chain containing no more than 25 amino acid variations (e.g., no more than 25, 24, 23, 22, 21, 20, 19, 18, 17, 16, 15, 14, 13, 12, 11, 10, 9, 8, 7, 6, 5, 4, 3, 2, or 1 amino acid variation) as compared with the heavy chain as set forth in SEQ ID NO: 182, SEQ ID NO: 771 or SEQ ID NO: 772. Alternatively or in addition (e.g., in addition), the anti-TfR antibody of the present disclosure comprises a light chain containing no more than 25 amino acid variations (e.g., no more than 25, 24, 23, 22, 21, 20, 19, 18, 17, 16, 15, 14, 13, 12, 11, 10, 9, 8, 7, 6, 5, 4, 3, 2, or 1 amino acid variation) as compared with the light chain as set forth in SEQ ID NO: 183. In some embodiments, the anti-TfR antibody described herein comprises a heavy chain comprising an amino acid sequence that is at least 75% (e.g., 75%, 80%, 85%, 90%, 95%, 98%, or 99%) identical to SEQ ID NO: 182, SEQ ID NO: 771 or SEQ ID NO: 772. Alternatively or in addition (e.g., in addition), the anti-TfR antibody described herein comprises a light chain comprising an amino acid sequence that is at least 75% (e.g., 75%, 80%, 85%, 90%, 95%, 98%, or 99%) identical to SEQ ID NO: 183. In some embodiments, the anti-TfR antibody described herein comprises a heavy chain comprising the amino acid sequence of SEQ ID NO: 182, SEQ ID NO: 771 or SEQ ID NO: 772. Alternatively or in addition (e.g., in addition), the anti-TfR antibody described herein comprises a light chain comprising the amino acid sequence of SEQ ID NO: 183.

[0370] In some embodiments, the anti-TfR antibody is a FAB fragment, F(ab′) fragment, or F(ab′)₂ fragment of an intact antibody (full-length antibody). Antigen binding fragment of an intact antibody (full-length antibody) can be prepared via routine methods (e.g., recombinantly or by digesting the heavy chain constant region of a full length IgG using an enzyme such as papain). For example, F(ab′)₂ fragments can be produced by pepsin or papain digestion of an antibody molecule, and Fab fragments that can be generated by reducing the disulfide bridges of F(ab′)₂ fragments. In some embodiments, a heavy chain constant region in a F(ab′) fragment of the anti-TfR1 antibody described herein comprises the amino acid sequence of:

(SEQ ID NO: 184)
ASTKGPSVFPLAPSSKSTSGGTAALGCLVKDYFPEPVTVSWNSGALTS
GVHTFPAVLQSSGLYSLSSVVTVPSSSLGTQTYICNVNHKPSNTKVDK
KVEPKSCDKTHT

[0371] In some embodiments, the anti-TfR antibody described herein comprises a heavy chain comprising any one of the VH as listed in Table 2 or any variants thereof and a heavy chain constant region that is at least 80%, at least 85%, at least 90%, at least 95%, or at least 99% identical to SEQ ID NO: 184. In some embodiments, the anti-TfR antibody described herein comprises a heavy chain comprising any one of the VH as listed in Table 2 or any variants thereof and a heavy chain constant region that contains no more than 25 amino acid variations (e.g., no more than 25, 24, 23, 22, 21, 20, 19, 18, 17, 16, 15, 14, 13, 12, 11, 10, 9, 8, 7, 6, 5, 4, 3, 2, or 1 amino acid variation) as compared with SEQ ID NO: 184. In some embodiments, the anti-TfR antibody described herein comprises a heavy chain comprising any one of the VH as listed in Table 2 or any variants thereof and a heavy chain constant region as set forth in SEQ ID NO: 184.

[0372] Examples of F(ab′) amino acid sequences of the anti-TfR antibodies described herein are provided in Table 6.

TABLE 6
Heavy chain and light chain sequences of examples of anti-TfR F(ab′)

| Antibody | F(ab′) Heavy Chain/Light Chain Sequences |
|---|---|
| 3-A4 | Heavy Chain (with partial human IgG1 constant region) |
| | EVQLQQSGAELVRPGASVKLSCTASGFNIKDDYMYWVKQRPEQGLEWIGWIDPENGDTEYAS |
| | KFQDKATVTADTSSNTAYLQLSSLTSEDTAVYYCTLWLRRGLDYWGQGTSVTVSSASTKGPS |
| | VFPLAPSSKSTSGGTAALGCLVKDYFPEPVTVSWNSGALTSGVHTFPAVLQSSGLYSLSSVV |
| | TVPSSSLGTQTYICNVNHKPSNTKVDKKVEPKSCDKTHT (SEQ ID NO: 185) |
| | Light Chain (with kappa light chain constant region) |
| | DIVMTQAAPSVPVTPGESVSISCRSSKSLLHSNGYTYLFWFLQRPGQSPQLLIYRMSNLASG |
| | VPDRFSGSGSGTAFTLRISRVEAEDVGVYYCMQHLEYPFTFGGGTKLEIKRTVAAPSVFIFP |
| | PSDEQLKSGTASVVCLLNNFYPREAKVQWKVDNALQSGNSQESVTEQDSKDSTYSLSSTLTL |
| | SKADYEKHKVYACEVTHQGLSSPVTKSFNRGEC (SEQ ID NO: 179) |
| 3-A4 | Heavy Chain (with partial human IgG1 constant region) |
| Variant 1 | EVQLQQSGAELVRPGASVKLSCTASGFNIKDDYMYWVKQRPEQGLEWIGWIDPETGDTEYAS |
| | KFQDKATVTADTSSNTAYLQLSSLTSEDTAVYYCTLWLRRGLDYWGQGTSVTVSSASTKGPS |
| | VFPLAPSSKSTSGGTAALGCLVKDYFPEPVTVSWNSGALTSGVHTFPAVLQSSGLYSLSSVV |
| | TVPSSSLGTQTYICNVNHKPSNTKVDKKVEPKSCDKTHT (SEQ ID NO: 773) |
| | Light Chain (with kappa light chain constant region) |
| | DIVMTQAAPSVPVTPGESVSISCRSSKSLLHSNGYTYLFWFLQRPGQSPQLLIYRMSNLASG |
| | VPDRFSGSGSGTAFTLRISRVEAEDVGVYYCMQHLEYPFTFGGGTKLEIKRTVAAPSVFIFP |
| | PSDEQLKSGTASVVCLLNNFYPREAKVQWKVDNALQSGNSQESVTEQDSKDSTYSLSSTLTL |
| | SKADYEKHKVYACEVTHQGLSSPVTKSFNRGEC (SEQ ID NO: 179) |
| 3-A4 | Heavy Chain (with partial human IgG1 constant region) |
| Variant 2 | EVQLQQSGAELVRPGASVKLSCTASGFNIKDDYMYWVKQRPEQGLEWIGWIDPESGDTEYAS |
| | KFQDKATVTADTSSNTAYLQLSSLTSEDTAVYYCTLWLRRGLDYWGQGTSVTVSSASTKGPS |
| | VFPLAPSSKSTSGGTAALGCLVKDYFPEPVTVSWNSGALTSGVHTFPAVLQSSGLYSLSSVV |
| | TVPSSSLGTQTYICNVNHKPSNTKVDKKVEPKSCDKTHT (SEQ ID NO: 774) |
| | Light Chain (with kappa light chain constant region) |
| | DIVMTQAAPSVPVTPGESVSISCRSSKSLLHSNGYTYLFWFLQRPGQSPQLLIYRMSNLASG |
| | VPDRFSGSGSGTAFTLRISRVEAEDVGVYYCMQHLEYPFTFGGGTKLEIKRTVAAPSVFIFP |
| | PSDEQLKSGTASVVCLLNNFYPREAKVQWKVDNALQSGNSQESVTEQDSKDSTYSLSSTLTL |
| | SKADYEKHKVYACEVTHQGLSSPVTKSFNRGEC (SEQ ID NO: 179) |
| 3-M12 | Heavy Chain (with partial human IgG1 constant region) |
| | DVQLQESGPGLVKPSQSLSLTCSVTGYSITSGYYWNWIRQFPGNKLEWMGYITFDGANNYNP |
| | SLKNRISITRDTSKNQFFLKLTSVTTEDTATYYCTRSSYDYDVLDYWGQGTTLTVSSASTKG |
| | PSVFPLAPSSKSTSGGTAALGCLVKDYFPEPVTVSWNSGALTSGVHTFPAVLQSSGLYSLSS |
| | VVTVPSSSLGTQTYICNVNHKPSNTKVDKKVEPKSCDKTHT (SEQ ID NO: 186) |
| | Light Chain (with kappa light chain constant region) |
| | DIQMTQTTSSLSASLGDRVTISCRASQDISNFLNWYQQRPDGTVKLLIYYTSRLHSGVPSRF |
| | SGSGSGTDFSLTVSNLEQEDIATYFCQQGHTLPYTFGGGTKLEIKRTVAAPSVFIFPPSDEQ |
| | LKSGTASVVCLLNNFYPREAKVQWKVDNALQSGNSQESVTEQDSKDSTYSLSSTLTLSKADY |
| | EKHKVYACEVTHQGLSSPVTKSFNRGEC (SEQ ID NO: 181) |
| 5-H12 | Heavy Chain (with partial human IgG1 constant region) |
| | QIQLQQSGPELVRPGASVKISCKASGYSFTDYCINWVNQRPGQGLEWIGWIYPGSGNTRYSE |
| | RFKGKATLTVDTSSNTAYMQLSSLTSEDSAVYFCAREDYYPYHGMDYWGQGTSVTVSSASTK |
| | GPSVFPLAPSSKSTSGGTAALGCLVKDYFPEPVTVSWNSGALTSGVHTFPAVLQSSGLYSLS |
| | SVVTVPSSSLGTQTYICNVNHKPSNTKVDKKVEPKSCDKTHT (SEQ ID NO: 187) |
| | Light Chain (with kappa light chain constant region) |
| | DIVLTQSPTSLAVSLGQRATISCRASESVDGYDNSFMHWYQQKPGQPPKLLIFRASNLESGI |
| | PARFSGSGSRTDFTLTINPVEAADVATYYCQQSSEDPWTFGGGTKLEIKRTVAAPSVFIFPP |
| | SDEQLKSGTASVVCLLNNFYPREAKVQWKVDNALQSGNSQESVTEQDSKDSTYSLSSTLTLS |
| | KADYEKHKVYACEVTHQGLSSPVTKSFNRGEC (SEQ ID NO: 183) |
| 5-H12 | Heavy Chain (with partial human IgG1 constant region) |
| Variant 1 | QIQLQQSGPELVRPGASVKISCKASGYSFTDYYINWVNQRPGQGLEWIGWIYPGSGNTRYSE |
| | RFKGKATLTVDTSSNTAYMQLSSLTSEDSAVYFCAREDYYPYHGMDYWGQGTSVTVSSASTK |
| | GPSVFPLAPSSKSTSGGTAALGCLVKDYFPEPVTVSWNSGALTSGVHTFPAVLQSSGLYSLS |
| | SVVTVPSSSLGTQTYICNVNHKPSNTKVDKKVEPKSCDKTHT (SEQ ID NO: 775) |
| | Light Chain (with kappa light chain constant region) |
| | DIVLTQSPTSLAVSLGQRATISCRASESVDGYDNSFMHWYQQKPGQPPKLLIFRASNLESGI |
| | PARFSGSGSRTDFTLTINPVEAADVATYYCQQSSEDPWTFGGGTKLEIKRTVAAPSVFIFPP |
| | SDEQLKSGTASVVCLLNNFYPREAKVQWKVDNALQSGNSQESVTEQDSKDSTYSLSSTLTLS |
| | KADYEKHKVYACEVTHQGLSSPVTKSFNRGEC (SEQ ID NO: 183) |
| 5-H12 | Heavy Chain (with partial human IgG1 constant region) |
| Variant 2 | QIQLQQSGPELVRPGASVKISCKASGYSFTDYDINWVNQRPGQGLEWIGWIYPGSGNTRYSE |
| | RFKGKATLTVDTSSNTAYMQLSSLTSEDSAVYFCAREDYYPYHGMDYWGQGTSVTVSSASTK |
| | GPSVFPLAPSSKSTSGGTAALGCLVKDYFPEPVTVSWNSGALTSGVHTFPAVLQSSGLYSLS |
| | SVVTVPSSSLGTQTYICNVNHKPSNTKVDKKVEPKSCDKTHT (SEQ ID NO: 776) |
| | Light Chain (with kappa light chain constant region) |
| | DIVLTQSPTSLAVSLGQRATISCRASESVDGYDNSFMHWYQQKPGQPPKLLIFRASNLESGI |
| | PARFSGSGSRTDFTLTINPVEAADVATYYCQQSSEDPWTFGGGTKLEIKRTVAAPSVFIFPP |
| | SDEQLKSGTASVVCLLNNFYPREAKVQWKVDNALQSGNSQESVTEQDSKDSTYSLSSTLTLS |
| | KADYEKHKVYACEVTHQGLSSPVTKSFNRGEC (SEQ ID NO: 183) |

* VH/VL sequences underlined

[0373] In some embodiments, the anti-TfR antibody of the present disclosure comprises a heavy chain containing no more than 25 amino acid variations (e.g., no more than 25, 24, 23, 22, 21, 20, 19, 18, 17, 16, 15, 14, 13, 12, 11, 10, 9, 8, 7, 6, 5, 4, 3, 2, or 1 amino acid variation) as compared with the heavy chain as set forth in SEQ ID NO: 185, SEQ ID NO: 186, SEQ ID NO: 187, SEQ ID NO: 773, SEQ ID NO: 774. SEQ ID NO: 775, or SEQ ID NO: 776. Alternatively or in addition (e.g., in addition), the anti-TfR antibody of the present disclosure comprises a light chain containing no more than 25 amino acid variations (e.g., no more than 25, 24, 23, 22, 21, 20, 19, 18, 17, 16, 15, 14, 13, 12, 11, 10, 9, 8, 7, 6, 5, 4, 3, 2, or 1 amino acid variation) as compared with the light chain as set forth in SEQ ID NO: 179, SEQ ID NO: 181, or SEQ ID NO: 183. In some embodiments, the anti-TfR antibody described herein comprises a heavy chain comprising an amino acid sequence that is at least 75% (e.g., 75%, 80%, 85%, 90%, 95%, 98%, or 99%) identical to SEQ ID NO: 185, SEQ ID NO: 186, SEQ ID NO: 187, SEQ ID NO: 773, SEQ ID NO: 774. SEQ ID NO: 775, or SEQ ID NO: 776. Alternatively or in addition (e.g., in addition), the anti-TfR antibody described herein comprises a light chain comprising an amino acid sequence that is at least 75% (e.g., 75%, 80%, 85%, 90%, 95%, 98%, or 99%) identical to SEQ ID NO: 179, SEQ ID NO: 181, or SEQ ID NO: 183. In some embodiments, the anti-TfR antibody described herein comprises a heavy chain comprising the amino acid sequence of SEQ ID NO: 185, SEQ ID NO: 186, SEQ ID NO: 187, SEQ ID NO: 773, SEQ ID NO: 774. SEQ ID NO: 775, or SEQ ID NO: 776. Alternatively or in addition (e.g., in addition), the anti-TfR antibody described herein comprises a light chain comprising the amino acid sequence of SEQ ID NO: 179, SEQ ID NO: 181, or SEQ ID NO: 183.

[0374] In some embodiments, the anti-TfR antibody of the present disclosure comprises a heavy chain containing no more than 25 amino acid variations (e.g., no more than 25, 24, 23, 22, 21, 20, 19, 18, 17, 16, 15, 14, 13, 12, 11, 10, 9, 8, 7, 6, 5, 4, 3, 2, or 1 amino acid variation) as compared with the heavy chain as set forth in SEQ ID NO: 185, SEQ ID NO: 773, or SEQ ID NO: 774. Alternatively or in addition (e.g., in addition), the anti-TfR antibody of the present disclosure comprises a light chain containing no more than 25 amino acid variations (e.g., no more than 25, 24, 23, 22, 21, 20, 19, 18, 17, 16, 15, 14, 13, 12, 11, 10, 9, 8, 7, 6, 5, 4, 3, 2, or 1 amino acid variation) as compared with the light chain as set forth in SEQ ID NO: 179. In some embodiments, the anti-TfR antibody described herein comprises a heavy chain comprising an amino acid sequence that is at least 75% (e.g., 75%, 80%, 85%, 90%, 95%, 98%, or 99%) identical to SEQ ID NO: 185, SEQ ID NO: 773, or SEQ ID NO: 774. Alternatively or in addition (e.g., in addition), the anti-TfR antibody described herein comprises a light chain comprising an amino acid sequence that is at least 75% (e.g., 75%, 80%, 85%, 90%, 95%, 98%, or 99%) identical to SEQ ID NO: 179. In some embodiments, the anti-TfR antibody described herein comprises a heavy chain comprising the amino acid sequence of SEQ ID NO: 185, SEQ ID NO: 773, or SEQ ID NO: 774. Alternatively or in addition (e.g., in addition), the anti-TfR antibody described herein comprises a light chain comprising the amino acid sequence of SEQ ID NO: 179.

[0375] In some embodiments, the anti-TfR antibody of the present disclosure comprises a heavy chain containing no more than 25 amino acid variations (e.g., no more than 25, 24, 23, 22, 21, 20, 19, 18, 17, 16, 15, 14, 13, 12, 11, 10, 9, 8, 7, 6, 5, 4, 3, 2, or 1 amino acid variation) as compared with the heavy chain as set forth in SEQ ID NO: 186. Alternatively or in addition (e.g., in addition), the anti-TfR antibody of the present disclosure comprises a light chain containing no more than 25 amino acid variations (e.g., no more than 25, 24, 23, 22, 21, 20, 19, 18, 17, 16, 15, 14, 13, 12, 10, 11, 9, 8, 7, 6, 5, 4, 3, 2, or 1 amino acid variation) as compared with the light chain as set forth in SEQ ID NO: 181. In some embodiments, the anti-TfR antibody described herein comprises a heavy chain comprising an amino acid sequence that is at least 75% (e.g., 75%, 80%, 85%, 90%, 95%, 98%, or 99%) identical to SEQ ID NO: 186. Alternatively or in addition (e.g., in addition), the anti-TfR antibody described herein comprises a light chain comprising an amino acid sequence that is at least 75% (e.g., 75%, 80%, 85%, 90%, 95%, 98%, or 99%) identical to SEQ ID NO: 181. In some embodiments, the anti-TfR antibody described herein comprises a heavy chain comprising the amino acid sequence of SEQ ID NO: 186. Alternatively or in addition (e.g., in addition), the anti-TfR antibody described herein comprises a light chain comprising the amino acid sequence of SEQ ID NO: 181.

[0376] In some embodiments, the anti-TfR antibody of the present disclosure comprises a heavy chain containing no more than 25 amino acid variations (e.g., no more than 25, 24, 23, 22, 21, 20, 19, 18, 17, 16, 15, 14, 13, 12, 11, 10, 9, 8, 7, 6, 5, 4, 3, 2, or 1 amino acid variation) as compared with the heavy chain as set forth in SEQ ID NO: 187, SEQ ID NO: 775, or SEQ ID NO: 776. Alternatively or in addition (e.g., in addition), the anti-TfR antibody of the present disclosure comprises a light chain containing no more than 25 amino acid variations (e.g., no more than 25, 24, 23, 22, 21, 20, 19, 18, 17, 16, 15, 14, 13, 12, 11, 10, 9, 8, 7, 6, 5, 4, 3, 2, or 1 amino acid variation) as compared with the light chain as set forth in SEQ ID NO: 183. In some embodiments, the anti-TfR antibody described herein comprises a heavy chain comprising an amino acid sequence that is at least 75% (e.g., 75%, 80%, 85%, 90%, 95%, 98%, or 99%) identical to SEQ ID NO: 187, SEQ ID NO: 775, or SEQ ID NO: 776. Alternatively or in addition (e.g., in addition), the anti-TfR antibody described herein comprises a light chain comprising an amino acid sequence that is at least 75% (e.g., 75%, 80%, 85%, 90%, 95%, 98%, or 99%) identical to SEQ ID NO: 183. In some embodiments, the anti-TfR antibody described herein comprises a heavy chain comprising the amino acid sequence of SEQ ID NO: 187, SEQ ID NO: 775, or SEQ ID NO: 776. Alternatively or in addition (e.g., in addition), the anti-TfR antibody described herein comprises a light chain comprising the amino acid sequence of SEQ ID NO: 183.

[0377] The anti-TfR receptor antibodies described herein can be in any antibody form, including, but not limited to, intact (i.e., full-length) antibodies, antigen-binding fragments thereof (such as Fab, F(ab′), F(ab′)2, Fv), single chain antibodies, bi-specific antibodies, or nanobodies. In some embodiments, the anti-TfR antibody described herein is a scFv. In some embodiments, the anti-TfR antibody described herein is a scFv-Fab (e.g., scFv fused to a portion of a constant region). In some embodiments, the anti-TfR receptor antibody described herein is a scFv fused to a constant region (e.g., human IgG1 constant region as set forth in SEQ ID NO: 175 or SEQ ID NO: 176, or a portion thereof such as the Fc portion) at either the N-terminus of C-terminus.

[0378] In some embodiments, any one of the anti-TfR1 antibodies described herein may comprise a signal peptide in the heavy and/or (e.g., and) light chain sequence (e.g., a N-terminal signal peptide). In some embodiments, the anti-TfR1 antibody described herein comprises any one of the VH and VL sequences, any one of the IgG heavy chain and light chain sequences, or any one of the F(ab′) heavy chain and light chain sequences described herein, and further comprises a signal peptide (e.g., a N-terminal signal peptide). In some embodiments, the signal peptide comprises the amino acid sequence of MGWSCIILFLVATATGVHS (SEQ ID NO: 214).

[0379] The present disclosure, in some aspects, provide another new anti-TfR antibody that can be used as a muscle-targeting agent (e.g., in a muscle-targeting complex). The CDR sequences and variable domain sequences of the antibody are provided in Table 7.

TABLE 7
CDR sequences of an anti-TfR antibody
according to different definition systems
and variable domain sequences

| No. | | | |
|---|---|---|---|
| system | IMGT | Kabat | Chothia |
| CDR-H1 | GYSFTSYW | SYWIG | GYSFTSY |
| | (SEQ ID NO: 188) | (SEQ ID NO: 194) | (SEQ ID NO: 199) |
| CDR-H2 | IYPGDSDT | IIYPGDSDTRYSPSFQGQ | GDS |
| | (SEQ ID NO: 189) | (SEQ ID NO: 195) | (SEQ ID NO: 200) |
| CDR-H3 | ARFPYDSSGYYSFDY | FPYDSSGYYSFDY | PYDSSGYYSFD |
| | (SEQ ID NO: 190) | (SEQ ID NO: 196) | (SEQ ID NO: 201) |
| CDR-L1 | QSISSY | RASQSISSYLN | SQSISSY |
| | (SEQ ID NO: 191) | (SEQ ID NO: 197) | (SEQ ID NO: 202) |
| CDR-L2 | AAS | AASSLQS | AAS |
| | (SEQ ID NO: 192) | (SEQ ID NO: 198) | (SEQ ID NO: 192) |
| CDR-L3 | QQSYSTPLT | QQSYSTPLT | SYSTPL |
| | (SEQ ID NO: 193) | (SEQ ID NO: 193) | (SEQ ID NO: 203) |

| | |
|---|---|
| VH | QVQLVQSGAEVKKPGESLKISCKGSGYSFTSYWIGWVRQMPGKGLEWMGIIYPGDSDTRY |
| | SPSFQGQVTISADKSISTAYLQWSSLKASDTAMYYCARFPYDSSGYYSFDYWGQGTLVTV |
| | SS (SEQ ID NO: 204) |
| VL | DIQMTQSPSSLSASVGDRVTITCRASQSISSYLNWYQQKPGKAPKLLIYAASSLQSGVPS |
| | RFSGSGSGTDFTLTISSLQPEDFATYYCQQSYSTPLTFGGGTKVEIK |
| | (SEQ ID NO: 205) |

[0380] In some embodiments, the anti-TfR antibodies of the present disclosure comprises one or more of the CDR-H (e.g., CDR-H1, CDR-H2, and CDR-H3) amino acid sequences from any one of the anti-TfR antibodies selected from Table 7. In some embodiments, the anti-TfR antibodies of the present disclosure comprise the CDR-H1, CDR-H2, and CDR-H3 as provided for each numbering system provided in Table 7. In some embodiments, the anti-TfR antibodies of the present disclosure comprises one or more of the CDR-L (e.g., CDR-L1, CDR-L2, and CDR-L3) amino acid sequences from any one of the anti-TfR antibodies selected from Table 7. In some embodiments, the anti-TfR antibodies of the present disclosure comprise the CDR-L1, CDR-L2, and CDR-L3 as provided for teach numbering system provided in Table 7.

[0381] In some embodiments, the anti-TfR antibodies of the present disclosure comprises the CDR-H1, CDR-H2, CDR-H3, CDR-L1, CDR-L2, and CDR-L3 as provided for each numbering system provided in Table 7. In some embodiments, antibody heavy and light chain CDR3 domains may play a particularly important role in the binding specificity/affinity of an antibody for an antigen. Accordingly, the anti-TfR antibodies of the disclosure may include at least the heavy and/or (e.g., and) light chain CDR3s of any one of the anti-TfR antibody provided in Table 7.

[0382] In some examples, any of the anti-TfR antibodies of the disclosure have one or more CDR (e.g., CDR-H or CDR-L) sequences substantially similar to any of the CDR-H1, CDR-H2, CDR-H3, CDR-L1, CDR-L2, and/or (e.g., and) CDR-L3 sequences provided in Table 7. In some embodiments, the position of one or more CDRs along the VH (e.g., CDR-H1, CDR-H2, or CDR-H3) and/or (e.g., and) VL (e.g., CDR-L1, CDR-L2, or CDR-L3) region of an antibody described herein can vary by one, two, three, four, five, or six amino acid positions so long as immunospecific binding to transferrin receptor (e.g., human transferrin receptor) is maintained (e.g., substantially maintained, for example, at least 50%, at least 60%, at least 70%, at least 80%, at least 90%, at least 95% of the binding of the original antibody from which it is derived). For example, in some embodiments, the position defining a CDR of any antibody described herein can vary by shifting the N-terminal and/or (e.g., and) C-terminal boundary of the CDR by one, two, three, four, five, or six amino acids, relative to the CDR position of any one of the antibodies described herein, so long as immunospecific binding to transferrin receptor (e.g., human transferrin receptor) is maintained (e.g., substantially maintained, for example, at least 50%, at least 60%, at least 70%, at least 80%, at least 90%, at least 95% of the binding of the original antibody from which it is derived). In another embodiment, the length of one or more CDRs along the VH (e.g., CDR-H1, CDR-H2, or CDR-H3) and/or (e.g., and) VL (e.g., CDR-L1, CDR-L2, or CDR-L3) region of an antibody described herein can vary (e.g., be shorter or longer) by one, two, three, four, five, or more amino acids, so long as immunospecific binding to transferrin receptor (e.g., human transferrin receptor) is maintained (e.g., substantially maintained, for example, at least 50%, at least 60%, at least 70%, at least 80%, at least 90%, at least 95% of the binding of the original antibody from which it is derived).

[0383] Accordingly, in some embodiments, a CDR-L1, CDR-L2, CDR-L3, CDR-H1, CDR-H2, and/or (e.g., and) CDR-H3 described herein may be one, two, three, four, five or more amino acids shorter than one or more of the CDRs described herein (e.g., provided in Table 7) so long as immunospecific binding to transferrin receptor (e.g., human transferrin receptor) is maintained (e.g., substantially maintained, for example, at least 50%, at least 60%, at least 70%, at least 80%, at least 90%, at least 95% relative to the binding of the original antibody from which it is derived). In some embodiments, a CDR-L1, CDR-L2, CDR-L3, CDR-H1, CDR-H2, and/or (e.g., and) CDR-H3 described herein may be one, two, three, four, five or more amino acids longer than one or more of the CDRs described herein (e.g., CDRS from the anti-TfR antibody provided in Table 7) so long as immunospecific binding to transferrin receptor (e.g., human transferrin receptor) is maintained (e.g., substantially maintained, for example, at least 50%, at least 60%, at least 70%, at least 80%, at least 90%, at least 95% relative to the binding of the original antibody from which it is derived). In some embodiments, the amino portion of a CDR-L1, CDR-L2, CDR-L3, CDR-H1, CDR-H2, and/or (e.g., and) CDR-H3 described herein can be extended by one, two, three, four, five or more amino acids compared to one or more of the CDRs described herein (e.g., CDRs from the anti-TfR antibody provided in Table 7) so long as immunospecific binding to transferrin receptor (e.g., human transferrin receptor is maintained (e.g., substantially maintained, for example, at least 50%, at least 60%, at least 70%, at least 80%, at least 90%, at least 95% relative to the binding of the original antibody from which it is derived). In some embodiments, the carboxy portion of a CDR-L1, CDR-L2, CDR-L3, CDR-H1, CDR-H2, and/or (e.g., and) CDR-H3 described herein can be extended by one, two, three, four, five or more amino acids compared to one or more of the CDRs described herein (e.g., CDRS from the anti-TfR antibody provided in Table 7) so long as immunospecific binding to transferrin receptor (e.g., human transferrin receptor) is maintained (e.g., substantially maintained, for example, at least 50%, at least 60%, at least 70%, at least 80%, at least 90%, at least 95% relative to the binding of the original antibody from which it is derived). In some embodiments, the amino portion of a CDR-L1, CDR-L2, CDR-L3, CDR-H1, CDR-H2, and/or (e.g., and) CDR-H3 described herein can be shortened by one, two, three, four, five or more amino acids compared to one or more of the CDRs described herein (e.g., CDRS from the anti-TfR antibody provided in Table 7) so long as immunospecific binding to transferrin receptor (e.g., human transferrin receptor) is maintained (e.g., substantially maintained, for example, at least 50%, at least 60%, at least 70%, at least 80%, at least 90%, at least 95% relative to the binding of the original antibody from which it is derived). In some embodiments, the carboxy portion of a CDR-L1, CDR-L2, CDR-L3, CDR-H1, CDR-H2, and/or (e.g., and) CDR-H3 described herein can be shortened by one, two, three, four, five or more amino acids compared to one or more of the CDRs described herein (e.g., CDRS from the anti-TfR antibody provided in Table 7) so long as immunospecific binding to transferrin receptor (e.g., human transferrin receptor) is maintained (e.g., substantially maintained, for example, at least 50%, at least 60%, at least 70%, at least 80%, at least 90%, at least 95% relative to the binding of the original antibody from which it is derived). Any method can be used to ascertain whether immunospecific binding to transferrin receptor (e.g., human transferrin receptor) is maintained, for example, using binding assays and conditions described in the art.

[0384] In some examples, any of the anti-TfR antibodies of the disclosure have one or more CDR (e.g., CDR-H or CDR-L) sequences substantially similar to any one of the anti-TfR antibody provided in Table 7. For example, the antibodies may include one or more CDR sequence(s) from the anti-TfR antibody provided in Table 7 and containing up to 5, 4, 3, 2, or 1 amino acid residue variations as compared to the corresponding CDR region in any one of the CDRs provided herein (e.g., CDRs from the anti-TfR antibody provided in Table 7) so long as immunospecific binding to transferrin receptor (e.g., human transferrin receptor) is maintained (e.g., substantially maintained, for example, at least 50%, at least 60%, at least 70%, at least 80%, at least 90%, at least 95% relative to the binding of the original antibody from which it is derived). In some embodiments, any of the amino acid variations in any of the CDRs provided herein may be conservative variations. Conservative variations can be introduced into the CDRs at positions where the residues are not likely to be involved in interacting with a transferrin receptor protein (e.g., a human transferrin receptor protein), for example, as determined based on a crystal structure.

[0385] Some aspects of the disclosure provide anti-TfR antibodies that comprise one or more of the heavy chain variable (VH) and/or (e.g., and) light chain variable (VL) domains provided herein. In some embodiments, the anti-TfR antibodies of the disclosure include any antibody that includes a heavy chain variable domain and/or (e.g., and) a light chain variable domain of the anti-TfR1 antibody provided in Table 7.

[0386] Aspects of the disclosure provide anti-TfR antibodies having a heavy chain variable (VH) and/or (e.g., and) a light chain variable (VL) domain amino acid sequence homologous to any of those described herein. In some embodiments, the anti-TfR antibody comprises a heavy chain variable sequence or a light chain variable sequence that is at least 75% (e.g., 80%, 85%, 90%, 95%, 98%, or 99%) identical to the heavy chain variable sequence and/or any light chain variable sequence provided in Table 7. In some embodiments, the homologous heavy chain variable and/or (e.g., and) a light chain variable amino acid sequences do not vary within any of the CDR sequences provided herein. For example, in some embodiments, the degree of sequence variation (e.g., 75%, 80%, 85%, 90%, 95%, 98%, or 99%) may occur within a heavy chain variable and/or (e.g., and) a light chain variable sequence excluding any of the CDR sequences provided herein. In some embodiments, any of the anti-TfR antibodies provided herein comprise a heavy chain variable sequence and a light chain variable sequence that comprises a framework sequence that is at least 75%, 80%, 85%, 90%, 95%, 98%, or 99% identical to the framework sequence of any anti-TfR antibody provided in Table 7.

[0387] In some embodiments, the anti-TfR antibody of the present disclosure comprises a CDR-H1, a CDR-H2, and a CDR-H3 of a heavy chain variable domain having the amino acid sequence of SEQ ID NO: 204. Alternatively or in addition (e.g., in addition), the anti-TfR antibody of the present disclosure comprises a CDR-L1, a CDR-L2, and a CDR-L3 of a light chain variable domain having the amino acid sequence of SEQ ID NO: 205.

[0388] In some embodiments, the anti-TfR antibody of the present disclosure comprises a CDR-H1 having the amino acid sequence of SEQ ID NO: 188 (according to the IMGT definition system), a CDR-H2 having the amino acid sequence of SEQ ID NO: 189 (according to the IMGT definition system), a CDR-H3 having the amino acid sequence of SEQ ID NO: 190 (according to the IMGT definition system), a CDR-L1 having the amino acid sequence of SEQ ID NO: 191 (according to the IMGT definition system), a CDR-L2 having the amino acid sequence of SEQ ID NO: 192 (according to the IMGT definition system), and a CDR-L3 having the amino acid sequence of SEQ ID NO: 193 (according to the IMGT definition system).

[0389] In some embodiments, anti-TfR antibody of the present disclosure comprises a CDR-H1, a CDR-H2, and a CDR-H3, which collectively contains no more than 5 amino acid variations (e.g., no more than 5, 4, 3, 2, or 1 amino acid variation) as compared with the CDR-H1 having the amino acid sequence of SEQ ID NO: 188, CDR-H2 having the amino acid sequence of SEQ ID NO: 189, and CDR-H3 having the amino acid sequence of SEQ ID NO: 190. Alternatively or in addition (e.g., in addition), the anti-TfR antibody of the present disclosure comprises a CDR-L1, a CDR-L2, and a CDR-L3, which collectively contains no more than 5 amino acid variations (e.g., no more than 5, 4, 3, 2 or 1 amino acid variation) as compared with the CDR-L1 having the amino acid sequence of SEQ ID NO: 191, CDR-L2 having the amino acid sequence of SEQ ID NO: 192, and CDR-L3 having the amino acid sequence of SEQ ID NO: 193.

[0390] In some embodiments, the anti-TfR antibody of the present disclosure comprises a CDR-H1, a CDR-H2, and a CDR-H3 that collectively are at least 75% (e.g., 75%, 80%, 85%, 90%, 95%, 98%, or 99%) identical to the CDR-H1 having the amino acid sequence of SEQ ID NO: 188, CDR-H2 having the amino acid sequence of SEQ ID NO: 189, and CDR-H3 having the amino acid sequence of SEQ ID NO: 190. Alternatively or in addition (e.g., in addition), the anti-TfR antibody of the present disclosure comprises a CDR-L1, a CDR-L2, and a CDR-L3 that collectively are at least 75% (e.g., 75%, 80%, 85%, 90%, 95%, 98%, or 99%) identical to the to the CDR-L1 having the amino acid sequence of SEQ ID NO: 191, CDR-L2 having the amino acid sequence of SEQ ID NO: 192, and CDR-L3 having the amino acid sequence of SEQ ID NO: 193.

[0391] In some embodiments, the anti-TfR antibody of the present disclosure comprises: a CDR-H1 having no more than 3 amino acid variations (e.g., no more than 3, 2, or 1 amino acid variation) as compared with the CDR-H1 having the amino acid sequence of SEQ ID NO: 188; a CDR-H2 having no more than 3 amino acid variations (e.g., no more than 3, 2, or 1 amino acid variation) as compared with the CDR-H2 having the amino acid sequence of SEQ ID NO: 189; and/or (e.g., and) a CDR-H3 having no more than 3 amino acid variations (e.g., no more than 3, 2, or 1 amino acid variation) as compared with the CDR-H3 having the amino acid sequence of SEQ ID NO: 190. Alternatively or in addition (e.g., in addition), the anti-TfR antibody of the present disclosure comprises: a CDR-L1 having no more than 3 amino acid variations (e.g., no more than 3, 2, or 1 amino acid variation) as compared with the CDR-L1 having the amino acid sequence of SEQ ID NO: 191; a CDR-L2 having no more than 3 amino acid variations (e.g., no more than 3, 2, or 1 amino acid variation) as compared with the CDR-L2 having the amino acid sequence of SEQ ID NO: 192; and/or (e.g., and) a CDR-L3 having no more than 3 amino acid variations (e.g., no more than 3, 2, or 1 amino acid variation) as compared with the CDR-L3 having the amino acid sequence of SEQ ID NO: 193.

[0392] In some embodiments, the anti-TfR antibody of the present disclosure comprises a CDR-H1 having the amino acid sequence of SEQ ID NO: 194 (according to the Kabat definition system), a CDR-H2 having the amino acid sequence of SEQ ID NO: 195 (according to the Kabat definition system), a CDR-H3 having the amino acid sequence of SEQ ID NO: 196 (according to the Kabat definition system), a CDR-L1 having the amino acid sequence of SEQ ID NO: 197 (according to the Kabat definition system), a CDR-L2 having the amino acid sequence of SEQ ID NO: 198 (according to the Kabat definition system), and a CDR-L3 having the amino acid sequence of SEQ ID NO: 193 (according to the Kabat definition system).

[0393] In some embodiments, anti-TfR antibody of the present disclosure comprises a CDR-H1, a CDR-H2, and a CDR-H3, which collectively contains no more than 5 amino acid variations (e.g., no more than 5, 4, 3, 2, or 1 amino acid variation) as compared with the CDR-H1 having the amino acid sequence of SEQ ID NO: 194, CDR-H2 having the amino acid sequence of SEQ ID NO: 195, and CDR-H3 having the amino acid sequence of SEQ ID NO: 196. “Collectively” means that the total number of amino acid variations in all of the three heavy chain CDRs is within the defined range. Alternatively or in addition (e.g., in addition), the anti-TfR antibody of the present disclosure comprises a CDR-L1, a CDR-L2, and a CDR-L3, which collectively contains no more than 5 amino acid variations (e.g., no more than 5, 4, 3, 2 or 1 amino acid variation) as compared with the CDR-L1 having the amino acid sequence of SEQ ID NO: 197, CDR-L2 having the amino acid sequence of SEQ ID NO: 198, and CDR-L3 having the amino acid sequence of SEQ ID NO: 193.

[0394] In some embodiments, the anti-TfR antibody of the present disclosure comprises a CDR-H1, a CDR-H2, and a CDR-H3 that collectively are at least 75% (e.g., 75%, 80%, 85%, 90%, 95%, 98%, or 99%) identical to the CDR-H1 having the amino acid sequence of SEQ ID NO: 194, CDR-H2 having the amino acid sequence of SEQ ID NO: 195, and CDR-H3 having the amino acid sequence of SEQ ID NO: 196. Alternatively or in addition (e.g., in addition), the anti-TfR antibody of the present disclosure comprises a CDR-L1, a CDR-L2, and a CDR-L3 that collectively are at least 75% (e.g., 75%, 80%, 85%, 90%, 95%, 98%, or 99%) identical to the to the CDR-L1 having the amino acid sequence of SEQ ID NO: 197, CDR-L2 having the amino acid sequence of SEQ ID NO: 198, and CDR-L3 having the amino acid sequence of SEQ ID NO: 193.

[0395] In some embodiments, the anti-TfR antibody of the present disclosure comprises: a CDR-H1 having no more than 3 amino acid variations (e.g., no more than 3, 2, or 1 amino acid variation) as compared with the CDR-H1 having the amino acid sequence of SEQ ID NO: 194; a CDR-H2 having no more than 3 amino acid variations (e.g., no more than 3, 2, or 1 amino acid variation) as compared with the CDR-H2 having the amino acid sequence of SEQ ID NO: 195; and/or (e.g., and) a CDR-H3 having no more than 3 amino acid variations (e.g., no more than 3, 2, or 1 amino acid variation) as compared with the CDR-H3 having the amino acid sequence of SEQ ID NO: 196. Alternatively or in addition (e.g., in addition), the anti-TfR antibody of the present disclosure comprises: a CDR-L1 having no more than 3 amino acid variations (e.g., no more than 3, 2, or 1 amino acid variation) as compared with the CDR-L1 having the amino acid sequence of SEQ ID NO: 197; a CDR-L2 having no more than 3 amino acid variations (e.g., no more than 3, 2, or 1 amino acid variation) as compared with the CDR-L2 having the amino acid sequence of SEQ ID NO: 198; and/or (e.g., and) a CDR-L3 having no more than 3 amino acid variations (e.g., no more than 3, 2, or 1 amino acid variation) as compared with the CDR-L3 having the amino acid sequence of SEQ ID NO: 193.

[0396] In some embodiments, the anti-TfR antibody of the present disclosure comprises a CDR-H1 having the amino acid sequence of SEQ ID NO: 199 (according to the Chothia definition system), a CDR-H2 having the amino acid sequence of SEQ ID NO: 200 (according to the Chothia definition system), a CDR-H3 having the amino acid sequence of SEQ ID NO: 201 (according to the Chothia definition system), a CDR-L1 having the amino acid sequence of SEQ ID NO: 202 (according to the Chothia definition system), a CDR-L2 having the amino acid sequence of SEQ ID NO: 192 (according to the Chothia definition system), and a CDR-L3 having the amino acid sequence of SEQ ID NO: 203 (according to the Chothia definition system).

[0397] In some embodiments, anti-TfR antibody of the present disclosure comprises a CDR-H1, a CDR-H2, and a CDR-H3, which collectively contains no more than 5 amino acid variations (e.g., no more than 5, 4, 3, 2, or 1 amino acid variation) as compared with the CDR-H1 having the amino acid sequence of SEQ ID NO: 199, CDR-H2 having the amino acid sequence of SEQ ID NO: 200, and CDR-H3 having the amino acid sequence of SEQ ID NO: 201. “Collectively” means that the total number of amino acid variations in all of the three heavy chain CDRs is within the defined range. Alternatively or in addition (e.g., in addition), the anti-TfR antibody of the present disclosure comprises a CDR-L1, a CDR-L2, and a CDR-L3, which collectively contains no more than 5 amino acid variations (e.g., no more than 5, 4, 3, 2 or 1 amino acid variation) as compared with the CDR-L1 having the amino acid sequence of SEQ ID NO: 202, CDR-L2 having the amino acid sequence of SEQ ID NO: 192, and CDR-L3 having the amino acid sequence of SEQ ID NO: 203.

[0398] In some embodiments, the anti-TfR antibody of the present disclosure comprises a CDR-H1, a CDR-H2, and a CDR-H3 that collectively are at least 75% (e.g., 75%, 80%, 85%, 90%, 95%, 98%, or 99%) identical to the CDR-H1 having the amino acid sequence of SEQ ID NO: 199, CDR-H2 having the amino acid sequence of SEQ ID NO: 200, and CDR-H3 having the amino acid sequence of SEQ ID NO: 201. Alternatively or in addition (e.g., in addition), the anti-TfR antibody of the present disclosure comprises a CDR-L1, a CDR-L2, and a CDR-L3 that collectively are at least 75% (e.g., 75%, 80%, 85%, 90%, 95%, 98%, or 99%) identical to the to the CDR-L1 having the amino acid sequence of SEQ ID NO: 202, CDR-L2 having the amino acid sequence of SEQ ID NO: 192, and CDR-L3 having the amino acid sequence of SEQ ID NO: 203.

[0399] In some embodiments, the anti-TfR antibody of the present disclosure comprises: a CDR-H1 having no more than 3 amino acid variations (e.g., no more than 3, 2, or 1 amino acid variation) as compared with the CDR-H1 having the amino acid sequence of SEQ ID NO: 199; a CDR-H2 having no more than 3 amino acid variations (e.g., no more than 3, 2, or 1 amino acid variation) as compared with the CDR-H2 having the amino acid sequence of SEQ ID NO: 200; and/or (e.g., and) a CDR-H3 having no more than 3 amino acid variations (e.g., no more than 3, 2, or 1 amino acid variation) as compared with the CDR-H3 having the amino acid sequence of SEQ ID NO: 201. Alternatively or in addition (e.g., in addition), the anti-TfR antibody of the present disclosure comprises: a CDR-L1 having no more than 3 amino acid variations (e.g., no more than 3, 2, or 1 amino acid variation) as compared with the CDR-L1 having the amino acid sequence of SEQ ID NO: 202; a CDR-L2 having no more than 3 amino acid variations (e.g., no more than 3, 2, or 1 amino acid variation) as compared with the CDR-L2 having the amino acid sequence of SEQ ID NO: 192; and/or (e.g., and) a CDR-L3 having no more than 3 amino acid variations (e.g., no more than 3, 2, or 1 amino acid variation) as compared with the CDR-L3 having the amino acid sequence of SEQ ID NO: 203.

[0400] In some embodiments, the In some embodiments, the anti-TfR antibody of the present disclosure comprises a CDR-H1 comprising the amino acid sequence of SEQ ID NO: 194, a CDR-H2 comprising the amino acid sequence of SEQ ID NO: 189, a CDR-H3 comprising the amino acid sequence of SEQ ID NO: 196, a CDR-L1 comprising the amino acid sequence of SEQ ID NO: 197, a CDR-L2 comprising the amino acid sequence of SEQ ID NO: 198, and a CDR-L3 comprising the amino acid sequence of SEQ ID NO: 193.

[0401] In some embodiments, the anti-TfR antibody of the present disclosure is a human antibody comprising a VH comprising the amino acid sequence of SEQ ID NO: 204. Alternatively or in addition (e.g., in addition), the anti-TfR antibody of the present disclosure is a human antibody comprising a VL comprising the amino acid sequence of SEQ ID NO: 205. In some embodiments, the present disclosure contemplate other humanized/human antibodies comprising the CDR-H1, CDR-H1, CDR-H3 of the VH comprising SEQ ID NO: 204 and the CDR-L1, CDR-L1, and CDR-L3 of the VL comprising SEQ ID NO: 205 with human framework regions.

[0402] In some embodiments, the anti-TfR antibody of the present disclosure comprises a VH containing no more than 25 amino acid variations (e.g., no more than 25, 24, 23, 22, 21, 20, 19, 18, 17, 16, 15, 14, 13, 12, 11, 10, 9, 8, 7, 6, 5, 4, 3, 2, or 1 amino acid variation) as compared with the VH as set forth in SEQ ID NO: 204. Alternatively or in addition (e.g., in addition), the anti-TfR antibody of the present disclosure comprises a VL containing no more than 25 amino acid variations (e.g., no more than 25, 24, 23, 22, 21, 20, 19, 18, 17, 16, 15, 14, 13, 12, 11, 10, 9, 8, 7, 6, 5, 4, 3, 2, or 1 amino acid variation) as compared with the VL as set forth in SEQ ID NO: 205.

[0403] In some embodiments, the anti-TfR antibody of the present disclosure comprises a VH comprising an amino acid sequence that is at least 75% (e.g., 75%, 80%, 85%, 90%, 95%, 98%, or 99%) identical to the VH as set forth in SEQ ID NO: 204. Alternatively or in addition (e.g., in addition), the anti-TfR antibody of the present disclosure comprises a VL comprising an amino acid sequence that is at least 75% (e.g., 75%, 80%, 85%, 90%, 95%, 98%, or 99%) identical to the VL as set forth in SEQ ID NO: 205.

[0404] In some embodiments, the anti-TfR antibody of the present disclosure is a humanized antibody. In some embodiments, the humanized anti-TfR antibody comprises a humanized VH comprising a CDR-H1 having the amino acid sequence of SEQ ID NO: 188 (according to the IMGT definition system), a CDR-H2 having the amino acid sequence of SEQ ID NO: 189 (according to the IMGT definition system), a CDR-H3 having the amino acid sequence of SEQ ID NO: 190 (according to the IMGT definition system); and a humanized VL comprising a CDR-L1 having the amino acid sequence of SEQ ID NO: 191 (according to the IMGT definition system), a CDR-L2 having the amino acid sequence of SEQ ID NO: 192 (according to the IMGT definition system), and a CDR-L3 having the amino acid sequence of SEQ ID NO: 193 (according to the IMGT definition system), wherein the humanized VH comprises an amino acid sequence that is at least 75% (e.g., 75%, 80%, 85%, 90%, 95%, 98%, or 99%) identical to the VH as set forth in SEQ ID NO: 204, and the humanized VL comprises an amino acid sequence that is at least 75% (e.g., 75%, 80%, 85%, 90%, 95%, 98%, or 99%) identical to the VL as set forth in SEQ ID NO: 205.

[0405] In some embodiments, the humanized anti-TfR antibody comprises a humanized VH comprising a CDR-H1 having the amino acid sequence of SEQ ID NO: 188 (according to the IMGT definition system), a CDR-H2 having the amino acid sequence of SEQ ID NO: 189 (according to the IMGT definition system), a CDR-H3 having the amino acid sequence of SEQ ID NO: 190 (according to the IMGT definition system); and a humanized VL comprising a CDR-L1 having the amino acid sequence of SEQ ID NO: 191 (according to the IMGT definition system), a CDR-L2 having the amino acid sequence of SEQ ID NO: 192 (according to the IMGT definition system), and a CDR-L3 having the amino acid sequence of SEQ ID NO: 193 (according to the IMGT definition system), wherein the humanized VH contains no more than 25 amino acid variations (e.g., no more than 25, 24, 23, 22, 21, 20, 19, 18, 17, 16, 15, 14, 13, 12, 11, 10, 9, 8, 7, 6, 5, 4, 3, 2, or 1 amino acid variation) as compared with the VH as set forth in SEQ ID NO: 204, and the humanized VL contains no more than 25 amino acid variations (e.g., no more than 25, 24, 23, 22, 21, 20, 19, 18, 17, 16, 15, 14, 13, 12, 11, 10, 9, 8, 7, 6, 5, 4, 3, 2, or 1 amino acid variation) as compared with the VL as set forth in SEQ ID NO: 205.

[0406] In some embodiments, the humanized anti-TfR antibody comprises a humanized VH comprising a CDR-H1 having the amino acid sequence of SEQ ID NO: 194 (according to the Kabat definition system), a CDR-H2 having the amino acid sequence of SEQ ID NO: 195 (according to the Kabat definition system), a CDR-H3 having the amino acid sequence of SEQ ID NO: 196 (according to the Kabat definition system), a CDR-L1 having the amino acid sequence of SEQ ID NO: 197 (according to the Kabat definition system), a CDR-L2 having the amino acid sequence of SEQ ID NO: 198 (according to the Kabat definition system), and a CDR-L3 having the amino acid sequence of SEQ ID NO: 193 (according to the Kabat definition system), wherein the humanized VH comprises an amino acid sequence that is at least 75% (e.g., 75%, 80%, 85%, 90%, 95%, 98%, or 99%) identical to the VH as set forth in SEQ ID NO: 204, and the humanized VL comprises an amino acid sequence that is at least 75% (e.g., 75%, 80%, 85%, 90%, 95%, 98%, or 99%) identical to the VL as set forth in SEQ ID NO: 205.

[0407] In some embodiments, the humanized anti-TfR antibody comprises a CDR-H1 having the amino acid sequence of SEQ ID NO: 194 (according to the Kabat definition system), a CDR-H2 having the amino acid sequence of SEQ ID NO: 195 (according to the Kabat definition system), a CDR-H3 having the amino acid sequence of SEQ ID NO: 196 (according to the Kabat definition system), a CDR-L1 having the amino acid sequence of SEQ ID NO: 197 (according to the Kabat definition system), a CDR-L2 having the amino acid sequence of SEQ ID NO: 198 (according to the Kabat definition system), and a CDR-L3 having the amino acid sequence of SEQ ID NO: 193 (according to the Kabat definition system), wherein the humanized VH contains no more than 25 amino acid variations (e.g., no more than 25, 24, 23, 22, 21, 20, 19, 18, 17, 16, 15, 14, 13, 12, 11, 10, 9, 8, 7, 6, 5, 4, 3, 2, or 1 amino acid variation) as compared with the VH as set forth in SEQ ID NO: 204, and the humanized VL contains no more than 25 amino acid variations (e.g., no more than 25, 24, 23, 22, 21, 20, 19, 18, 17, 16, 15, 14, 13, 12, 11, 10, 9, 8, 7, 6, 5, 4, 3, 2, or 1 amino acid variation) as compared with the VL as set forth in SEQ ID NO: 205.

[0408] In some embodiments, the humanized anti-TfR antibody comprises a humanized VH comprising a CDR-H1 having the amino acid sequence of SEQ ID NO: 199 (according to the Chothia definition system), a CDR-H2 having the amino acid sequence of SEQ ID NO: 200 (according to the Chothia definition system), a CDR-H3 having the amino acid sequence of SEQ ID NO: 201 (according to the Chothia definition system), a CDR-L1 having the amino acid sequence of SEQ ID NO: 202 (according to the Chothia definition system), a CDR-L2 having the amino acid sequence of SEQ ID NO: 192 (according to the Chothia definition system), and a CDR-L3 having the amino acid sequence of SEQ ID NO: 203 (according to the Chothia definition system), wherein the humanized VH comprises an amino acid sequence that is at least 75% (e.g., 75%, 80%, 85%, 90%, 95%, 98%, or 99%) identical to the VH as set forth in SEQ ID NO: 204, and the humanized VL comprises an amino acid sequence that is at least 75% (e.g., 75%, 80%, 85%, 90%, 95%, 98%, or 99%) identical to the VL as set forth in SEQ ID NO: 205.

[0409] In some embodiments, the humanized anti-TfR antibody comprises a CDR-H1 having the amino acid sequence of SEQ ID NO: 199 (according to the Chothia definition system), a CDR-H2 having the amino acid sequence of SEQ ID NO: 200 (according to the Chothia definition system), a CDR-H3 having the amino acid sequence of SEQ ID NO: 201 (according to the Chothia definition system), a CDR-L1 having the amino acid sequence of SEQ ID NO: 202 (according to the Chothia definition system), a CDR-L2 having the amino acid sequence of SEQ ID NO: 192 (according to the Chothia definition system), and a CDR-L3 having the amino acid sequence of SEQ ID NO: 203 (according to the Chothia definition system), wherein the humanized VH contains no more than 25 amino acid variations (e.g., no more than 25, 24, 23, 22, 21, 20, 19, 18, 17, 16, 15, 14, 13, 12, 11, 10, 9, 8, 7, 6, 5, 4, 3, 2, or 1 amino acid variation) as compared with the VH as set forth in SEQ ID NO: 204, and the humanized VL contains no more than 25 amino acid variations (e.g., no more than 25, 24, 23, 22, 21, 20, 19, 18, 17, 16, 15, 14, 13, 12, 11, 10, 9, 8, 7, 6, 5, 4, 3, 2, or 1 amino acid variation) as compared with the VL as set forth in SEQ ID NO: 205.

[0410] In some embodiments, the anti-TfR antibody is an IgG, a Fab fragment, a F(ab′)₂ fragment, a scFv, or an scFv fused to a constant region (e.g., N- or C-terminal fusion). Non-limiting examples of anti-TfR antibodies in different formats are provided herein.

[0411] In some embodiments, the anti-TfR1 antibody is a single-chain fragment variable (scFv) comprising the VH and VL in a single polypeptide chain. In some embodiments, the scFv comprises any one of the heavy chain CDRs, light chain CDRs, VHs, and/or (e.g., and) VLs described herein on a single polypeptide chain. In some embodiments, the scFv comprises the VH linked at the N-terminus of the VL. In some embodiments, the scFv comprises the VL linked at the N-terminus of the VH. In some embodiments, the VH and VL are linked via a linker (e.g., a polypeptide linker). Any polypeptide linker can be used for linking the VH and VL in the scFv. Selection of a linker sequence is within the abilities of those skilled in the art.

[0412] In some embodiments, the scFv comprises a VH (e.g., a humanized VH) comprising a CDR-H1 having the amino acid sequence of SEQ ID NO: 188 (according to the IMGT definition system), a CDR-H2 having the amino acid sequence of SEQ ID NO: 189 (according to the IMGT definition system), a CDR-H3 having the amino acid sequence of SEQ ID NO: 190 (according to the IMGT definition system); and a VL (e.g., a humanized VL) comprising a CDR-L1 having the amino acid sequence of SEQ ID NO: 191 (according to the IMGT definition system), a CDR-L2 having the amino acid sequence of SEQ ID NO: 192 (according to the IMGT definition system), and a CDR-L3 having the amino acid sequence of SEQ ID NO: 193 (according to the IMGT definition system), wherein the VH and VL are on a single polypeptide chain (e.g., linked via an amide bond or linked via a linker such as a peptide linker), and wherein the VH is linked to the N-terminus or the C-terminus of the VL. In some embodiments, the VH and VL are linked via a linker comprising the amino acid sequence of EGKSSGSGSESKAS (SEQ ID NO: 215).

[0413] In some embodiments, the scFv comprises a VH (e.g., a humanized VH) comprising a CDR-H1 having the amino acid sequence of SEQ ID NO: 194 (according to the Kabat definition system), a CDR-H2 having the amino acid sequence of SEQ ID NO: 195 (according to the Kabat definition system), a CDR-H3 having the amino acid sequence of SEQ ID NO: 196 (according to the Kabat definition system); and a VL (e.g., a humanized VL) comprising a CDR-L1 having the amino acid sequence of SEQ ID NO: 197 (according to the Kabat definition system), a CDR-L2 having the amino acid sequence of SEQ ID NO: 198 (according to the Kabat definition system), and a CDR-L3 having the amino acid sequence of SEQ ID NO: 193 (according to the Kabat definition system), wherein the VH and VL are on a single polypeptide chain (e.g., linked via an amide bond or linked via a linker such as a peptide linker), and wherein the VH is linked to the N-terminus or the C-terminus of the VL. In some embodiments, the VH and VL are linked via a linker comprising the amino acid sequence of EGKSSGSGSESKAS (SEQ ID NO: 215).

[0414] In some embodiments, the scFv comprises a VH (e.g., a humanized VH) comprising a CDR-H1 having the amino acid sequence of SEQ ID NO: 199 (according to the Chothia definition system), a CDR-H2 having the amino acid sequence of SEQ ID NO: 200 (according to the Chothia definition system), a CDR-H3 having the amino acid sequence of SEQ ID NO: 201 (according to the Chothia definition system); and a VL (e.g., a humanized VL) comprising a CDR-L1 having the amino acid sequence of SEQ ID NO: 202 (according to the Chothia definition system), a CDR-L2 having the amino acid sequence of SEQ ID NO: 192 (according to the Chothia definition system), and a CDR-L3 having the amino acid sequence of SEQ ID NO: 203 (according to the Chothia definition system), wherein the VH and VL are on a single polypeptide chain (e.g., linked via an amide bond or linked via a linker such as a peptide linker), and wherein the VH is linked to the N-terminus or the C-terminus of the VL. In some embodiments, the VH and VL are linked via a linker comprising the amino acid sequence of EGKSSGSGSESKAS (SEQ ID NO: 215).

[0415] In some embodiments, the scFV comprises a VH (e.g., a humanized VH) comprising an amino acid sequence that is at least 75% (e.g., 75%, 80%, 85%, 90%, 95%, 98%, or 99%) identical to the VH as set forth in SEQ ID NO: 204 and a VL (e.g., a humanized VL) comprising an amino acid sequence that is at least 75% (e.g., 75%, 80%, 85%, 90%, 95%, 98%, or 99%) identical to the VL as set forth in SEQ ID NO: 205, wherein the VH and VL are in a single polypeptide chain (e.g., linked via an amide bond or linked via a linker such as a peptide linker), and wherein the VH is linked to the N-terminus or the C-terminus of the VL. In some embodiments, the VH and VL are linked via a linker comprising the amino acid sequence of EGKSSGSGSESKAS (SEQ ID NO: 215).

[0416] In some embodiments, the scFV comprises a VH (e.g., a humanized VH) that contains no more than 25 amino acid variations (e.g., no more than 25, 24, 23, 22, 21, 20, 19, 18, 17, 16, 15, 14, 13, 12, 11, 10, 9, 8, 7, 6, 5, 4, 3, 2, or 1 amino acid variation) as compared with the VH as set forth in SEQ ID NO: 204, and a humanized VL (e.g., a humanized VL) that contains no more than 25 amino acid variations (e.g., no more than 25, 24, 23, 22, 21, 20, 19, 18, 17, 16, 15, 14, 13, 12, 11, 10, 9, 8, 7, 6, 5, 4, 3, 2, or 1 amino acid variation) as compared with the VL as set forth in SEQ ID NO: 205, wherein the VH and VL are in a single polypeptide chain (e.g., linked via an amide bond or linked via a linker such as a peptide linker), and wherein the VH is linked to the N-terminus or the C-terminus of the VL. In some embodiments, the VH and VL are linked via a linker comprising the amino acid sequence of EGKSSGSGSESKAS (SEQ ID NO: 215).

[0417] In some embodiments, the scFV comprises a VH comprising the amino acid sequence of SEQ ID NO: 204 and a VL comprising the amino acid sequence of SEQ ID NO: 205, wherein the VH and VL are in a single polypeptide chain (e.g., linked via an amide bond or linked via a linker such as a peptide linker), and wherein the VH is linked to the N-terminus or the C-terminus of the VL. In some embodiments, the VH and VL are linked via a linker comprising the amino acid sequence of EGKSSGSGSESKAS (SEQ ID NO: 215).

[0418] In some embodiments, the scFv comprises a VH comprising the amino acid sequence of SEQ ID NO: 204 linked to the N-terminus of a VL comprising the amino acid sequence of SEQ ID NO: 205. In some embodiments, the VH and VL are linked via a linker comprising the amino acid sequence of EGKSSGSGSESKAS (SEQ ID NO: 215).

[0419] In some embodiments, the scFv comprises a VH comprising the amino acid sequence of SEQ ID NO: 204 linked to the C-terminus of a VL comprising the amino acid sequence of SEQ ID NO: 205. In some embodiments, the VH and VL are linked via a linker comprising the amino acid sequence of EGKSSGSGSESKAS (SEQ ID NO: 215).

[0420] The amino acid sequence of an scFV is provided below (VL-linker-VH):

(SEQ ID NO: 206)
DIQMTQSPSSLSASVGDRVTITCRASQSISSYLNWYQQKPGKAPKLLIYA
ASSLQSGVPSRFSGSGSGTDFTLTISSLQPEDFATYYCQQSYSTPLTFGG
GTKVEIKEGKSSGSGSESKASQVQLVQSGAEVKKPGESLKISCKGSGYSF
TSYWIGWVRQMPGKGLEWMGIIYPGDSDTRYSPSFQGQVTISADKSISTA
YLQWSSLKASDTAMYYCARFPYDSSGYYSFDYWGQGTLVTVSS

[0421] In some embodiments, the scFv described herein comprises an amino acid sequence that is at least 75% (e.g., 75%, 80%, 85%, 90%, 95%, 98%, or 99%) identical to the VH as set forth in SEQ ID NO: 206. In some embodiments, the scFv described herein comprises an amino acid sequence that contains no more than 25 amino acid variations (e.g., no more than 25, 24, 23, 22, 21, 20, 19, 18, 17, 16, 15, 14, 13, 12, 11, 10, 9, 8, 7, 6, 5, 4, 3, 2, or 1 amino acid variation) as compared with SEQ ID NO: 206. In some embodiments, the scFv comprises the amino acid sequence of SEQ ID NO: 206.

[0422] In some embodiments, the anti-TfR antibody described herein comprises an scFv (e.g., any one of the scFv described herein) linked to a constant region. In some embodiments, the Fc region is a fragment crystallizable region (Fc region). The Fc region is a fragment of a heavy chain constant region that interacts with cell surface receptors called Fc receptors. Any known Fc regions may be used in accordance with the present disclosure and be fused to any one of the scFv described herein. The amino acid sequence of an example of Fc region is provided below:

(SEQ ID NO: 207)
PKSCDKTHTCPPCPAPELLGGPSVFLFPPKPKDTLMISRTPEVTCVVVDV
SHEDPEVKFNWYVDGVEVHNAKTKPREEQYNSTYRVVSVLTVLHQDWLNG
KEYKCKVSNKALPAPIEKTISKAKGQPREPQVYTLPPSRDELTKNQVSLT
CLVKGFYPSDIAVEWESNGQPENNYKTTPPVLDSDGSFFLYSKLTVDKSR
WQQGNVFSCSVMHEALHNHYTQKSLSLSPGK

[0423] In some embodiments, the anti-TfR antibody described herein comprises an scFv (e.g., any one of the scFv described herein or variants thereof) linked (e.g., via an amide bond or a linker such as a peptide linker) at the C-terminus to a Fc region that is at least 75% (e.g., 75%, 80%, 85%, 90%, 95%, 98%, or 99%) identical to the Fc region as set forth in SEQ ID NO: 207. In some embodiments, the anti-TfR antibody described herein comprises an scFv (e.g., any one of the scFv described herein or variants thereof) linked (e.g., via an amide bond or a linker such as a peptide linker) at the C-terminus to a Fc region that contains no more than 25 amino acid variations (e.g., no more than 25, 24, 23, 22, 21, 20, 19, 18, 17, 16, 15, 14, 13, 12, 11, 10, 9, 8, 7, 6, 5, 4, 3, 2, or 1 amino acid variation) as compared with SEQ ID NO: 207. In some embodiments, the anti-TfR antibody described herein comprises an scFv (e.g., any one of the scFv described herein or variants thereof) linked (e.g., via an amide bond or a linker such as a peptide linker) at the C-terminus to a Fc region set forth in SEQ ID NO: 207. In some embodiments, the scFV and the Fc are linked via a linker comprising the amino acid sequence of DIEGRMD (SEQ ID NO: 729).

[0424] The amino acid sequence of an example of anti-TfR antibody comprising an scFv (e.g., any one of the scFv described herein) linked at the C-terminus to a Fc region is provided below (VL-linker1-VH-linker2-Fc):

(SEQ ID NO: 208)
DIQMTQSPSSLSASVGDRVTITCRASQSISSYLNWYQQKPGKAPKLLIYA
ASSLQSGVPSRFSGSGSGTDFTLTISSLQPEDFATYYCQQSYSTPLTFGG
GTKVEIKEGKSSGSGSESKASQVQLVQSGAEVKKPGESLKISCKGSGYSF
TSYWIGWVRQMPGKGLEWMGIIYPGDSDTRYSPSFQGQVTISADKSISTA
YLQWSSLKASDTAMYYCARFPYDSSGYYSFDYWGQGTLVTVSSDIEGRMD
PKSCDKTHTCPPCPAPELLGGPSVFLFPPKPKDTLMISRTPEVTCVVVDV
SHEDPEVKFNWYVDGVEVHNAKTKPREEQYNSTYRVVSVLTVLHQDWLNG
KEYKCKVSNKALPAPIEKTISKAKGQPREPQVYTLPPSRDELTKNQVSLT
CLVKGFYPSDIAVEWESNGQPENNYKTTPPVLDSDGSFFLYSKLTVDKSR
WQQGNVFSCSVMHEALHNHYTQKSLSLSPGK

[0425] In some embodiments, the anti-TfR antibody described herein comprises an amino acid sequence that is at least 75% (e.g., 75%, 80%, 85%, 90%, 95%, 98%, or 99%) identical to SEQ ID NO: 208. In some embodiments, the anti-TfR antibody described herein comprises an amino acid sequence that contains no more than 25 amino acid variations (e.g., no more than 25, 24, 23, 22, 21, 20, 19, 18, 17, 16, 15, 14, 13, 12, 11, 10, 9, 8, 7, 6, 5, 4, 3, 2, or 1 amino acid variation) as compared with SEQ ID NO: 208. In some embodiments, the anti-TfR antibody comprises the amino acid sequence of SEQ ID NO: 208.

[0426] In some embodiments, the anti-TfR antibody described herein comprises an scFv (e.g., any one of the scFv described herein) linked (e.g., via an amide bond or a linker such as a peptide linker) at the N-terminus to a Fc region that is at least 75% (e.g., 75%, 80%, 85%, 90%, 95%, 98%, or 99%) identical to the Fc region as set forth in SEQ ID NO: 207. In some embodiments, the anti-TfR antibody described herein comprises an scFv (e.g., any one of the scFv described herein) linked (e.g., via an amide bond or a linker such as a peptide linker) at the N-terminus to a Fc region that contains no more than 25 amino acid variations (e.g., no more than 25, 24, 23, 22, 21, 20, 19, 18, 17, 16, 15, 14, 13, 12, 11, 10, 9, 8, 7, 6, 5, 4, 3, 2, or 1 amino acid variation) as compared with SEQ ID NO: 207. In some embodiments, the anti-TfR antibody described herein comprises an scFv (e.g., any one of the scFv described herein) linked (e.g., via an amide bond or a linker such as a peptide linker) at the N-terminus to a Fc region set forth in SEQ ID NO: 207. In some embodiments, the scFV and the Fc are linked via a linker comprising the amino acid sequence of DIEGRMD (SEQ ID NO: 729).

[0427] The amino acid sequence of an example of anti-TfR antibody comprising an scFv (e.g., any one of the scFv described herein) linked at the N-terminus to a Fc region is provided below (Fc-linker2-VL-linker1-VH):

(SEQ ID NO: 209)
PKSCDKTHTCPPCPAPELLGGPSVFLFPPKPKDTLMISRTPEVTCVVVDV
SHEDPEVKFNWYVDGVEVHNAKTKPREEQYNSTYRVVSVLTVLHQDWLNG
KEYKCKVSNKALPAPIEKTISKAKGQPREPQVYTLPPSRDELTKNQVSLT
CLVKGFYPSDIAVEWESNGQPENNYKTTPPVLDSDGSFFLYSKLTVDKSR
WQQGNVFSCSVMHEALHNHYTQKSLSLSPGKDIEGRMDDIQMTQSPSSLS
ASVGDRVTITCRASQSISSYLNWYQQKPGKAPKLLIYAASSLQSGVPSRF
SGSGSGTDFTLTISSLQPEDFATYYCQQSYSTPLTFGGGTKVEIKEGKSS
GSGSESKASQVQLVQSGAEVKKPGESLKISCKGSGYSFTSYWIGWVRQMP
GKGLEWMGIIYPGDSDTRYSPSFQGQVTISADKSISTAYLQWSSLKASDT
AMYYCARFPYDSSGYYSFDYWGQGTLVTVSS

[0428] In some embodiments, the anti-TfR antibody described herein comprises an amino acid sequence that is at least 75% (e.g., 75%, 80%, 85%, 90%, 95%, 98%, or 99%) identical to SEQ ID NO: 209. In some embodiments, the anti-TfR antibody described herein comprises an amino acid sequence that contains no more than 25 amino acid variations (e.g., no more than 25, 24, 23, 22, 21, 20, 19, 18, 17, 16, 15, 14, 13, 12, 11, 10, 9, 8, 7, 6, 5, 4, 3, 2, or 1 amino acid variation) as compared with SEQ ID NO: 209. In some embodiments, the anti-TfR antibody comprises the amino acid sequence of SEQ ID NO: 209.

[0429] In some embodiments, the anti-TfR antibody described herein is an IgG. In some embodiments, the IgG comprises a heavy chain and a light chain, wherein the heavy chain comprises the CDR-H1, CDRH2, and CDR-H3 of any one of the anti-TfR antibodies described herein, and further comprises a heavy chain constant region or a portion thereof (e.g., CH1, CH2, CH3, or a combination thereof); and wherein the light chain comprises the CDR-L1, CDRL2, and CDR-L3 of any one of the anti-TfR antibodies described herein, and further comprises a light chain constant region. In some embodiments, the IgG comprises a heavy chain and a light chain, wherein the heavy chain comprises the VH of any one of the anti-TfR antibodies described herein, and further comprises a heavy chain constant region or a portion thereof (e.g., CH1, CH2, CH3, or a combination thereof); and wherein the light chain comprises the VL of any one of the anti-TfR antibodies described herein, and further comprises a light chain constant region.

[0430] The heavy chain constant region can of any suitable origin, e.g., human, mouse, rat, or rabbit. In one specific example, the heavy chain constant region is from a human IgG (a gamma heavy chain), e.g., IgG1, IgG2, or IgG4. An example of human IgG1 constant region is given below:

(SEQ ID NO: 175)
[sequence omitted]

[0431] In some embodiments, the heavy chain of any of the anti-TfR antibodies described herein comprises a mutant human IgG1 constant region. For example, the introduction of LALA mutations (a mutant derived from mAb b12 that has been mutated to replace the lower hinge residues Leu234 Leu235 with Ala234 and Ala235) in the CH2 domain of human IgG1 is known to reduce Fcg receptor binding (Bruhns, P., et al. (2009) and Xu, D. et al. (2000)). The mutant human IgG1 constant region is provided below (mutations bonded and underlined):

(SEQ ID NO: 176)
ASTKGPSVFPLAPSSKSTSGGTAALGCLVKDYFPEPVTVSWNSGALTSGV
HTFPAVLQSSGLYSLSSVVTVPSSSLGTQTYICNVNHKPSNTKVDKKVEP
KSCDKTHTCPPCPAPEAAGGPSVFLFPPKPKDTLMISRTPEVTCVVVDVS
HEDPEVKFNWYVDGVEVHNAKTKPREEQYNSTYRVVSVLTVLHQDWLNGK
EYKCKVSNKALPAPIEKTISKAKGQPREPQVYTLPPSRDELTKNQVSLTC
LVKGFYPSDIAVEWESNGQPENNYKTTPPVLDSDGSFFLYSKLTVDKSRW
QQGNVFSCSVMHEALHNHYTQKSLSLSPGK

[0432] In some embodiments, the light chain constant region of any of the anti-TfR antibodies described herein can be any light chain constant region known in the art. In some examples, a kappa light chain or a lambda light chain. In some embodiments, the light chain constant region is a kappa light chain, the sequence of which is provided below:

(SEQ ID NO: 177)
RTVAAPSVFIFPPSDEQLKSGTASVVCLLNNFYPREAKVQWKVDNALQSG
NSQESVTEQDSKDSTYSLSSTLTLSKADYEKHKVYACEVTHQGLSSPVTK
SFNRGEC

[0433] Other antibody heavy and light chain constant regions are well known in the art, e.g., those provided in the IMGT database (www.imgt.org) or at www.vbase2.org/vbstat.php., both of which are incorporated by reference herein.

[0434] In some embodiments, the anti-TfR antibody described herein comprises a heavy chain comprising the a VH comprising the amino acid sequence of SEQ ID NO: 204 or any variants thereof and a heavy chain constant region that at least 75% (e.g., 75%, 80%, 85%, 90%, 95%, 98%, or 99%) identical to SEQ ID NO: 175 or SEQ ID NO: 176. In some embodiments, the anti-TfR antibody described herein comprises a heavy chain comprising the a VH comprising the amino acid sequence of SEQ ID NO: 204 or any variants thereof and a heavy chain constant region that contains no more than 25 amino acid variations (e.g., no more than 25, 24, 23, 22, 21, 20, 19, 18, 17, 16, 15, 14, 13, 12, 11, 10, 9, 8, 7, 6, 5, 4, 3, 2, or 1 amino acid variation) as compared with the heavy chain as set forth in SEQ ID NO: 175 or SEQ ID NO: 176.

[0435] In some embodiments, the anti-TfR antibody described herein comprises a heavy chain comprising a VH set forth in SEQ ID NO: 204 and a heavy chain constant region set forth in SEQ ID NO: 175. In some embodiments, the anti-TfR antibody described herein comprises a heavy chain comprising a VH set forth in SEQ ID NO: 204 and a heavy chain constant region as set forth in SEQ ID NO: 176.

[0436] In some embodiments, the anti-TfR antibody described herein comprises a light chain comprising a VL comprising the amino acid sequence of SEQ ID NO: 205 or any variants thereof and a light chain constant region that is at least 75% (e.g., 75%, 80%, 85%, 90%, 95%, 98%, or 99%) identical to SEQ ID NO: 177. In some embodiments, the anti-TfR antibody described herein comprises a light chain comprising a VL comprising the amino acid sequence of SEQ ID NO: 205 or any variants thereof and a light constant region that contains no more than 25 amino acid variations (e.g., no more than 25, 24, 23, 22, 21, 20, 19, 18, 17, 16, 15, 14, 13, 12, 11, 10, 9, 8, 7, 6, 5, 4, 3, 2, or 1 amino acid variation) as compared with the heavy chain as set forth in SEQ ID NO: 177.

[0437] In some embodiments, the anti-TfR antibody described herein comprises a light chain comprising a VL set forth in SEQ ID NO: 205 and a light chain constant region as set forth in SEQ ID NO: 177.

[0438] Examples of IgG heavy chain and light chain amino acid sequences of the anti-TfR antibodies described are provided below.

anti-TfR IgG heavy chain (with wild type human
IgG1 constant region, VH underlined)
(SEQ ID NO: 210)
QVQLVQSGAEVKKPGESLKISCKGSGYSFTSYWIGWVRQMPGKGLEWMGI
IYPGDSDTRYSPSFQGQVTISADKSISTAYLQWSSLKASDTAMYYCARFP
YDSSGYYSFDYWGQGTLVTVSSASTKGPSVFPLAPSSKSTSGGTAALGCL
VKDYFPEPVTVSWNSGALTSGVHTFPAVLQSSGLYSLSSVVTVPSSSLGT
QTYICNVNHKPSNTKVDKKVEPKSCDKTHTCPPCPAPELLLGGPSVFLFP
PKPKDTLMISRTPEVTCVVVDVSHEDPEVKFNWYVDGVEVHNAKTKPREE
QYNSTYRVVSVLTVLHQDWLNGKEYKCKVSNKALPAPIEKTISKAKGQPR
EPQVYTLPPSRDELTKNQVSLTCLVKGFYPSDIAVEWESNGQPENNYKTT
PPVLDSDGSFFLYSKLTVDKSRWQQGNVFSCSVMHEALHNHYTQKSLSLS
PGK
anti-TfR IgG heavy chain (with human IgG1 constant
region mutant L234A/L235A, VH underlined)
(SEQ ID NO: 211)
QVQLVQSGAEVKKPGESLKISCKGSGYSFTSYWIGWVRQMPGKGLEWMGI
IYPGDSDTRYSPSFQGQVTISADKSISTAYLQWSSLKASDTAMYYCARFP
YDSSGYYSFDYWGQGTLVTVSSASTKGPSVFPLAPSSKSTSGGTAALGCL
VKDYFPEPVTVSWNSGALTSGVHTFPAVLQSSGLYSLSSVVTVPSSSLGT
QTYICNVNHKPSNTKVDKKVEPKSCDKTHTCPPCPAPEAAGGPSVFLFPP
KPKDTLMISRTPEVTCVVVDVSHEDPEVKFNWYVDGVEVHNAKTKPREEQ
YNSTYRVVSVLTVLHQDWLNGKEYKCKVSNKALPAPIEKTISKAKGQPRE
PQVYTLPPSRDELTKNQVSLTCLVKGFYPSDIAVEWESNGQPENNYKTTP
PVLDSDGSFFLYSKLTVDKSRWQQGNVFSCSVMHEALHNHYTQKSLSLSP
GK
anti-TfR IgG light chain (kappa, VL underlined)
(SEQ ID NO: 212)
DIQMTQSPSSLSASVGDRVTITCRASQSISSYLNWYQQKPGKAPKLLIYA
ASSLQSGVPSRFSGSGSGTDFTLTISSLQPEDFATYYCQQSYSTPLTFGG
GTKVEIKRTVAAPSVFIFPPSDEQLKSGTASVVCLLNNFYPREAKVQWKV
DNALQSGNSQESVTEQDSKDSTYSLSSTLTLSKADYEKHKVYACEVTHQG
LSSPVTKSFNRGEC

[0439] In some embodiments, the anti-TfR antibody described herein comprises a heavy chain comprising an amino acid sequence that is at least 75% (e.g., 75%, 80%, 85%, 90%, 95%, 98%, or 99%) identical to SEQ ID NO: 210 or SEQ ID NO: 211. Alternatively or in addition (e.g., in addition), the anti-TfR antibody described herein comprises a light chain comprising an amino acid sequence that is at least 75% (e.g., 75%, 80%, 85%, 90%, 95%, 98%, or 99%) identical to any one of SEQ ID NOs: 212.

[0440] In some embodiments, the anti-TfR antibody of the present disclosure comprises a heavy chain containing no more than 25 amino acid variations (e.g., no more than 25, 24, 23, 22, 21, 20, 19, 18, 17, 16, 15, 14, 13, 12, 11, 10, 9, 8, 7, 6, 5, 4, 3, 2, or 1 amino acid variation) as compared with the heavy chain as set forth in SEQ ID NO: 210 or SEQ ID NO: 211. Alternatively or in addition (e.g., in addition), the anti-TfR antibody of the present disclosure comprises a light chain containing no more than 25 amino acid variations (e.g., no more than 25, 24, 23, 22, 21, 20, 19, 18, 17, 16, 15, 14, 13, 12, 11, 10, 9, 8, 7, 6, 5, 4, 3, 2, or 1 amino acid variation) as compared with the light chain as set forth in SEQ ID NO: 212.

[0441] In some embodiments, the anti-TfR antibody described herein comprises a heavy chain comprising the amino acid sequence of SEQ ID NO: 210 or SEQ ID NO: 211. Alternatively or in addition (e.g., in addition), the anti-TfR antibody described herein comprises a light chain comprising the amino acid sequence of any one of SEQ ID NO: 212.

[0442] In some embodiments, the anti-TfR antibody is a FAB fragment or F(ab′)₂ fragment of an intact antibody (full-length antibody). Antigen binding fragment of an intact antibody (full-length antibody) can be prepared via routine methods (e.g., recombinantly or by digesting the heavy chain constant region of a full length IgG using an enzyme such as papain). For example, F(ab′)₂ fragments can be produced by pepsin or papain digestion of an antibody molecule, and Fab fragments that can be generated by reducing the disulfide bridges of F(ab′)₂ fragments. In some embodiments, a heavy chain constant region in a F(ab′) fragment of the anti-TfR1 antibody described herein comprises the amino acid sequence of: ASTKGPSVFPLAPSSKSTSGGTAALGCLVKDYFPEPVTVSWNSGALTSGVHTFPAVLQSSGLYSLSSVVT VPSSSLGTQTYICNVNHKPSNTKVDKKVEPKSCDKTHT (SEQ ID NO: 184)

[0443] In some embodiments, the anti-TfR antibody described herein comprises a heavy chain comprising the a VH comprising the amino acid sequence of SEQ ID NO: 204 or any variants thereof and a heavy chain constant region that at least 75% (e.g., 75%, 80%, 85%, 90%, 95%, 98%, or 99%) identical to SEQ ID NO: 184. In some embodiments, the anti-TfR antibody described herein comprises a heavy chain comprising the a VH comprising the amino acid sequence of SEQ ID NO: 204 or any variants thereof and a heavy chain constant region that contains no more than 25 amino acid variations (e.g., no more than 25, 24, 23, 22, 21, 20, 19, 18, 17, 16, 15, 14, 13, 12, 11, 10, 9, 8, 7, 6, 5, 4, 3, 2, or 1 amino acid variation) as compared with the heavy chain as set forth in SEQ ID NO: 184.

[0444] In some embodiments, the anti-TfR antibody described herein comprises a heavy chain comprising a VH set forth in SEQ ID NO: 204 and a heavy chain constant region as set forth in SEQ ID NO: 184.

[0445] Exemplary F(ab′) amino acid sequences of an anti-TfR antibody described herein are provided below.

anti-TfR Fab′ heavy chain (with human IgG1
constant region fragment, VH underlined)
(SEQ ID NO: 213)
QVQLVQSGAEVKKPGESLKISCKGSGYSFTSYWIGWVRQMPGKGLEWMGI
IYPGDSDTRYSPSFQGQVTISADKSISTAYLQWSSLKASDTAMYYCARFP
YDSSGYYSFDYWGQGTLVTVSSASTKGPSVFPLAPSSKSTSGGTAALGCL
VKDYFPEPVTVSWNSGALTSGVHTFPAVLQSSGLYSLSSVVTVPSSSLGT
QTYICNVNHKPSNTKVDKKVEPKSCDKTHTCP
or
(SEQ ID NO: 777)
QVQLVQSGAEVKKPGESLKISCKGSGYSFTSYWIGWVRQMPGKGLEWMGI
IYPGDSDTRYSPSFQGQVTISADKSISTAYLQWSSLKASDTAMYYCARFP
YDSSGYYSFDYWGQGTLVTVSSASTKGPSVFPLAPSSKSTSGGTAALGCL
VKDYFPEPVTVSWNSGALTSGVHTFPAVLQSSGLYSLSSVVTVPSSSLGT
QTYICNVNHKPSNTKVDKKVEPKSCDKTHT
anti-TfR Fab′ light chain (kappa, VL underlined)
(SEQ ID NO: 212)
DIQMTQSPSSLSASVGDRVTITCRASQSISSYLNWYQQKPGKAPKLLIYA
ASSLQSGVPSRFSGSGSGTDFTLTISSLQPEDFATYYCQQSYSTPLTFGG
GTKVEIKRTVAAPSVFIFPPSDEQLKSGTASVVCLLNNFYPREAKVQWKV
DNALQSGNSQESVTEQDSKDSTYSLSSTLTLSKADYEKHKVYACEVTHQG
LSSPVTKSFNRGEC

[0446] In some embodiments, the anti-TfR antibody described herein comprises a heavy chain comprising an amino acid sequence that is at least 75% (e.g., 75%, 80%, 85%, 90%, 95%, 98%, or 99%) identical to SEQ ID NO: 213 or SEQ ID NO: 777. Alternatively or in addition (e.g., in addition), the anti-TfR antibody described herein comprises a light chain comprising an amino acid sequence that is at least 75% (e.g., 75%, 80%, 85%, 90%, 95%, 98%, or 99%) identical to SEQ ID NO: 212. In some embodiments, the anti-TfR antibody of the present disclosure comprises a heavy chain containing no more than 25 amino acid variations (e.g., no more than 25, 24, 23, 22, 21, 20, 19, 18, 17, 16, 15, 14, 13, 12, 11, 10, 9, 8, 7, 6, 5, 4, 3, 2, or 1 amino acid variation) as compared with the heavy chain as set forth in SEQ ID NO: 213 or SEQ ID NO: 777. Alternatively or in addition (e.g., in addition), the anti-TfR antibody of the present disclosure comprises a light chain containing no more than 25 amino acid variations (e.g., no more than 25, 24, 23, 22, 21, 20, 19, 18, 17, 16, 15, 14, 13, 12, 11, 10, 9, 8, 7, 6, 5, 4, 3, 2, or 1 amino acid variation) as compared with the light chain as set forth in SEQ ID NO: 212. In some embodiments, the anti-TfR antibody described herein comprises a heavy chain comprising the amino acid sequence of SEQ ID NO: 213 or SEQ ID NO: 777. Alternatively or in addition (e.g., in addition), the anti-TfR antibody described herein comprises a light chain comprising the amino acid sequence of SEQ ID NO: 212.

[0447] In some embodiments, any one of the anti-TfR1 antibodies described herein may comprise a signal peptide in the heavy and/or (e.g., and) light chain sequence (e.g., a N-terminal signal peptide). In some embodiments, the anti-TfR1 antibody described herein comprises any one of the VH and VL sequences, any one of the IgG heavy chain and light chain sequences listed, or any one of the F(ab′) heavy chain and light chain sequences described herein, and further comprises a signal peptide (e.g., a N-terminal signal peptide). In some embodiments, the signal peptide comprises the amino acid sequence of MGWSCIILFLVATATGVHS (SEQ ID NO: 214).

### Other Known Anti-Transferrin Receptor Antibodies

[0448] Any other appropriate anti-transferrin receptor antibodies known in the art may be used as the muscle-targeting agent in the complexes disclosed herein. Examples of known anti-transferrin receptor antibodies, including associated references and binding epitopes, are listed in Table 8. In some embodiments, the anti-transferrin receptor antibody comprises the complementarity determining regions (CDR-H1, CDR-H2, CDR-H3, CDR-L1, CDR-L2, and CDR-L3) of any of the anti-transferrin receptor antibodies provided herein, e.g., anti-transferrin receptor antibodies listed in Table 8.

TABLE 8
List of anti-transferrin receptor antibody clones, including
associated references and binding epitope information.

| Antibody Clone Name | Reference(s) | Epitope/Notes |
|---|---|---|
| OKT9 | U.S. Pat. No. 4,364,934, filed | Apical domain of TfR |
| | Dec. 4, 1979, entitled | (residues 305-366 of |
| | “MONOCLONAL ANTIBODY TO | human TfR sequence |
| | A HUMAN EARLY THYMOCYTE | XM_052730.3, available |
| | ANTIGEN AND METHODS FOR | in GenBank) |
| | PREPARING SAME” Schneider | |
| | C. et al. “Structural features | |
| | of the cell surface receptor for | |
| | transferrin that is recognized by | |
| | the monoclonal antibody OKT9.” | |
| | J Biol Chem. 1982, 257: 14, | |
| | 8516-8522. | |
| (From JCR) | WO 2015/098989, filed Dec. 24, 2014, | Apical domain (residues |
| Clone M11 | “Novel anti-Transferrin receptor | 230-244 and 326-347 of TfR) |
| Clone M23 | antibody that passes through | and protease-like domain |
| Clone M27 | blood-brain barrier” | (residues 461-473) |
| Clone B84 | U.S. Pat. No. 9,994,641, filed | |
| | Dec. 24, 2014, “Novel anti- | |
| | Transferrin receptor antibody | |
| | that passes through blood-brain | |
| | barrier” | |
| (From Genentech) | WO 2016/081643, filed May 26, 2016, | Apical domain and non- |
| 7A4, 8A2, 15D2, 10D11, | entitled “ANTI-TRANSFERRIN | apical regions |
| 7B10, 15G11, 16G5, 13C3, | RECEPTOR ANTIBODIES AND | |
| 16G4, 16F6, 7G7, 4C2, | METHODS OF USE” | |
| 1B12, and 13D4 | U.S. Pat. No. 9,708,406, filed | |
| | May 20, 2014, “Anti-transferrin | |
| | receptor antibodies and methods of use” | |
| (From Armagen) | Lee et al. “Targeting Rat Anti-Mouse | |
| 8D3 | Transferrin Receptor Monoclonal | |
| | Antibodies through Blood-Brain Barrier | |
| | in Mouse” 2000, J Pharmacol. Exp. | |
| | Ther., 292: 1048-1052. | |
| | U.S. Pat. App. 2010/077498, filed | |
| | Sep. 11, 2008, entitled “COMPOSITIONS | |
| | AND METHODS FOR BLOOD-BRAIN | |
| | BARRIER DELIVERY IN THE MOUSE” | |
| OX26 | Haobam, B. et al. 2014. Rab17-mediated | |
| | recycling endosomes contribute to | |
| | autophagosome formation in response | |
| | to Group A Streptococcus invasion. | |
| | Cellular microbiology. 16: 1806-21. | |
| DF1513 | Ortiz-Zapater E et al. Trafficking of | |
| | the human transferrin receptor | |
| | in plant cells: effects of tyrphostin | |
| | A23 and brefeldin A. Plant J 48: 757- | |
| | 70 (2006). | |
| 1A1B2, 66IG10, MEM-189, JF0956, | Commercially available anti- | Novus Biologicals 8100 |
| 29806, 1A1B2, TFRC/1818, 1E6, | transferrin receptor antibodies. | Southpark Way, A-8 |
| 66Ig10, TFRC/1059, Q1/71, 23D10, | | Littleton CO 80120 |
| 13E4, TFRC/1149, ER-MP21, | | |
| YTA74.4, BU54, 2B6, RI7 217 | | |
| (From INSERM) | U.S. Pat. App. 2011/0311544A1, filed | Does not compete with OKT9 |
| BA120g | Jun. 15, 2005, entitled “ANTI-CD71 | |
| | MONOCLONAL ANTIBODIES | |
| | AND USES THEREOF FOR | |
| | TREATING MALIGNANT TUMOR CELLS” | |
| LUCA31 | U.S. Pat. No. 7,572,895, filed | “LUCA31 epitope” |
| | Jun. 7, 2004, entitled “TRANSFERRIN | |
| | RECEPTOR ANTIBODIES” | |
| (Salk Institute) | Trowbridge, I. S. et al. “Anti- | |
| B3/25 | transferrin receptor monoclonal | |
| T58/30 | antibody and toxin-antibody conjugates | |
| | affect growth of human tumour cells.” | |
| | Nature, 1981, volume 294, pages 171-173 | |
| R17 217.1.3, | Commercially available anti-transferrin | BioXcell 10 Technology Dr., |
| 5E9C11, | receptor antibodies. | Suite 2B West Lebanon, NH |
| OKT9 (BE0023 clone) | | 03784-1671 USA |
| BK19.9, B3/25, | Gatter, K. C. et al. “Transferrin | |
| T56/14 and T58/1 | receptors in human tissues: their | |
| | distribution and possible clinical | |
| | relevance.” J Clin Pathol. 1983 May; | |
| | 36(5): 539-45. | |

Anti-TfR antibody 15G11
CDRs listed in Table 9
VH (SEQ ID NO: 230)
VL (SEQ ID NO: 231)
Fab′ HC (SEQ ID NO: 240)
Fab′ LC (SEQ ID NO: 237)
Anti-TfR antibody
CDRH1 (SEQ ID NO: 3870)
CDRH2 (SEQ ID NO: 3871)
CDRH3 (SEQ ID NO: 3872)
CDRL1 (SEQ ID NO: 3873)
CDRL2 (SEQ ID NO: 3874)
CDRL3 (SEQ ID NO: 3875)
VH (SEQ ID NO: 3876)
VL(SEQ ID NO: 3877)

Additional Anti-TfR SEQ ID NOs

| | VH/VL | CDR1 | CDR2 | CDR3 |
|---|---|---|---|---|
| VH1 | 3886 | 3878 | 3879 | 3872 |
| VH2 | 3887 | 3878 | 3880 | 3872 |
| VH3 | 3888 | 3878 | 3881 | 3872 |
| VH4 | 3889 | 3878 | 3880 | 3872 |
| VL1 | 3890 | 3873 | 3874 | 3882 |
| VL2 | 3891 | 3873 | 3874 | 3882 |
| VL3 | 3892 | 3873 | 3883 | 3875 |
| VL4 | 3893 | 3884 | 3885 | 3875 |

[0449] In some embodiments, transferrin receptor antibodies of the present disclosure include one or more of the CDR-H (e.g., CDR-H1, CDR-H2, and CDR-H3) amino acid sequences from any one of the anti-transferrin receptor antibodies selected from Table 8. In some embodiments, transferrin receptor antibodies include the CDR-H1, CDR-H2, and CDR-H3 as provided for any one of the anti-transferrin receptor antibodies selected from Table 8. In some embodiments, anti-transferrin receptor antibodies include the CDR-L1, CDR-L2, and CDR-L3 as provided for any one of the anti-transferrin receptor antibodies selected from Table 8. In some embodiments, anti-transferrin antibodies include the CDR-H1, CDR-H2, CDR-H3, CDR-L1, CDR-L2, and CDR-L3 as provided for any one of the anti-transferrin receptor antibodies selected from Table 8. The disclosure also includes any nucleic acid sequence that encodes a molecule comprising a CDR-H1, CDR-H2, CDR-H3, CDR-L1, CDR-L2, or CDR-L3 as provided for any one of the anti-transferrin receptor antibodies selected from Table 8. In some embodiments, antibody heavy and light chain CDR3 domains may play a particularly important role in the binding specificity/affinity of an antibody for an antigen. Accordingly, anti-transferrin receptor antibodies of the disclosure may include at least the heavy and/or (e.g., and) light chain CDR3s of any one of the anti-transferrin receptor antibodies selected from Table 8.

[0450] In some examples, any of the anti-transferrin receptor antibodies of the disclosure have one or more CDR (e.g., CDR-H or CDR-L) sequences substantially similar to any of the CDR-H1, CDR-H2, CDR-H3, CDR-L1, CDR-L2, and/or (e.g., and) CDR-L3 sequences from one of the anti-transferrin receptor antibodies selected from Table 8. In some embodiments, the position of one or more CDRs along the VH (e.g., CDR-H1, CDR-H2, or CDR-H3) and/or (e.g., and) VL (e.g., CDR-L1, CDR-L2, or CDR-L3) region of an antibody described herein can vary by one, two, three, four, five, or six amino acid positions so long as immunospecific binding to transferrin receptor (e.g., human transferrin receptor) is maintained (e.g., substantially maintained, for example, at least 50%, at least 60%, at least 70%, at least 80%, at least 90%, at least 95% of the binding of the original antibody from which it is derived). For example, in some embodiments, the position defining a CDR of any antibody described herein can vary by shifting the N-terminal and/or (e.g., and) C-terminal boundary of the CDR by one, two, three, four, five, or six amino acids, relative to the CDR position of any one of the antibodies described herein, so long as immunospecific binding to transferrin receptor (e.g., human transferrin receptor) is maintained (e.g., substantially maintained, for example, at least 50%, at least 60%, at least 70%, at least 80%, at least 90%, at least 95% of the binding of the original antibody from which it is derived). In another embodiment, the length of one or more CDRs along the VH (e.g., CDR-H1, CDR-H2, or CDR-H3) and/or (e.g., and) VL (e.g., CDR-L1, CDR-L2, or CDR-L3) region of an antibody described herein can vary (e.g., be shorter or longer) by one, two, three, four, five, or more amino acids, so long as immunospecific binding to transferrin receptor (e.g., human transferrin receptor) is maintained (e.g., substantially maintained, for example, at least 50%, at least 60%, at least 70%, at least 80%, at least 90%, at least 95% of the binding of the original antibody from which it is derived).

[0451] Accordingly, in some embodiments, a CDR-L1, CDR-L2, CDR-L3, CDR-H1, CDR-H2, and/or (e.g., and) CDR-H3 described herein may be one, two, three, four, five or more amino acids shorter than one or more of the CDRs described herein (e.g., CDRS from any of the anti-transferrin receptor antibodies selected from Table 8) so long as immunospecific binding to transferrin receptor (e.g., human transferrin receptor) is maintained (e.g., substantially maintained, for example, at least 50%, at least 60%, at least 70%, at least 80%, at least 90%, at least 95% relative to the binding of the original antibody from which it is derived). In some embodiments, a CDR-L1, CDR-L2, CDR-L3, CDR-H1, CDR-H2, and/or (e.g., and) CDR-H3 described herein may be one, two, three, four, five or more amino acids longer than one or more of the CDRs described herein (e.g., CDRS from any of the anti-transferrin receptor antibodies selected from Table 8) so long as immunospecific binding to transferrin receptor (e.g., human transferrin receptor) is maintained (e.g., substantially maintained, for example, at least 50%, at least 60%, at least 70%, at least 80%, at least 90%, at least 95% relative to the binding of the original antibody from which it is derived). In some embodiments, the amino portion of a CDR-L1, CDR-L2, CDR-L3, CDR-H1, CDR-H2, and/or (e.g., and) CDR-H3 described herein can be extended by one, two, three, four, five or more amino acids compared to one or more of the CDRs described herein (e.g., CDRS from any of the anti-transferrin receptor antibodies selected from Table 8) so long as immunospecific binding to transferrin receptor (e.g., human transferrin receptor is maintained (e.g., substantially maintained, for example, at least 50%, at least 60%, at least 70%, at least 80%, at least 90%, at least 95% relative to the binding of the original antibody from which it is derived). In some embodiments, the carboxy portion of a CDR-L1, CDR-L2, CDR-L3, CDR-H1, CDR-H2, and/or (e.g., and) CDR-H3 described herein can be extended by one, two, three, four, five or more amino acids compared to one or more of the CDRs described herein (e.g., CDRS from any of the anti-transferrin receptor antibodies selected from Table 8) so long as immunospecific binding to transferrin receptor (e.g., human transferrin receptor) is maintained (e.g., substantially maintained, for example, at least 50%, at least 60%, at least 70%, at least 80%, at least 90%, at least 95% relative to the binding of the original antibody from which it is derived). In some embodiments, the amino portion of a CDR-L1, CDR-L2, CDR-L3, CDR-H1, CDR-H2, and/or (e.g., and) CDR-H3 described herein can be shortened by one, two, three, four, five or more amino acids compared to one or more of the CDRs described herein (e.g., CDRS from any of the anti-transferrin receptor antibodies selected from Table 8) so long as immunospecific binding to transferrin receptor (e.g., human transferrin receptor) is maintained (e.g., substantially maintained, for example, at least 50%, at least 60%, at least 70%, at least 80%, at least 90%, at least 95% relative to the binding of the original antibody from which it is derived). In some embodiments, the carboxy portion of a CDR-L1, CDR-L2, CDR-L3, CDR-H1, CDR-H2, and/or (e.g., and) CDR-H3 described herein can be shortened by one, two, three, four, five or more amino acids compared to one or more of the CDRs described herein (e.g., CDRS from any of the anti-transferrin receptor antibodies selected from Table 8) so long as immunospecific binding to transferrin receptor (e.g., human transferrin receptor) is maintained (e.g., substantially maintained, for example, at least 50%, at least 60%, at least 70%, at least 80%, at least 90%, at least 95% relative to the binding of the original antibody from which it is derived). Any method can be used to ascertain whether immunospecific binding to transferrin receptor (e.g., human transferrin receptor) is maintained, for example, using binding assays and conditions described in the art.

[0452] In some examples, any of the anti-transferrin receptor antibodies of the disclosure have one or more CDR (e.g., CDR-H or CDR-L) sequences substantially similar to any one of the anti-transferrin receptor antibodies selected from Table 8. For example, the antibodies may include one or more CDR sequence(s) from any of the anti-transferrin receptor antibodies selected from Table 8 containing up to 5, 4, 3, 2, or 1 amino acid residue variations as compared to the corresponding CDR region in any one of the CDRs provided herein (e.g., CDRs from any of the anti-transferrin receptor antibodies selected from Table 8) so long as immunospecific binding to transferrin receptor (e.g., human transferrin receptor) is maintained (e.g., substantially maintained, for example, at least 50%, at least 60%, at least 70%, at least 80%, at least 90%, at least 95% relative to the binding of the original antibody from which it is derived). In some embodiments, any of the amino acid variations in any of the CDRs provided herein may be conservative variations. Conservative variations can be introduced into the CDRs at positions where the residues are not likely to be involved in interacting with a transferrin receptor protein (e.g., a human transferrin receptor protein), for example, as determined based on a crystal structure. Some aspects of the disclosure provide transferrin receptor antibodies that comprise one or more of the heavy chain variable (VH) and/or (e.g., and) light chain variable (VL) domains provided herein. In some embodiments, any of the VH domains provided herein include one or more of the CDR-H sequences (e.g., CDR-H1, CDR-H2, and CDR-H3) provided herein, for example, any of the CDR-H sequences provided in any one of the anti-transferrin receptor antibodies selected from Table 8. In some embodiments, any of the VL domains provided herein include one or more of the CDR-L sequences (e.g., CDR-L1, CDR-L2, and CDR-L3) provided herein, for example, any of the CDR-L sequences provided in any one of the anti-transferrin receptor antibodies selected from Table 8.

[0453] In some embodiments, anti-transferrin receptor antibodies of the disclosure include any antibody that includes a heavy chain variable domain and/or (e.g., and) a light chain variable domain of any anti-transferrin receptor antibody, such as any one of the anti-transferrin receptor antibodies selected from Table 8. In some embodiments, anti-transferrin receptor antibodies of the disclosure include any antibody that includes the heavy chain variable and light chain variable pairs of any anti-transferrin receptor antibody, such as any one of the anti-transferrin receptor antibodies selected from Table 8.

[0454] Aspects of the disclosure provide anti-transferrin receptor antibodies having a heavy chain variable (VH) and/or (e.g., and) a light chain variable (VL) domain amino acid sequence homologous to any of those described herein. In some embodiments, the anti-transferrin receptor antibody comprises a heavy chain variable sequence or a light chain variable sequence that is at least 75% (e.g., 80%, 85%, 90%, 95%, 98%, or 99%) identical to the heavy chain variable sequence and/or any light chain variable sequence of any anti-transferrin receptor antibody, such as any one of the anti-transferrin receptor antibodies selected from Table 8. In some embodiments, the homologous heavy chain variable and/or (e.g., and) a light chain variable amino acid sequences do not vary within any of the CDR sequences provided herein. For example, in some embodiments, the degree of sequence variation (e.g., 75%, 80%, 85%, 90%, 95%, 98%, or 99%) may occur within a heavy chain variable and/or (e.g., and) a light chain variable sequence excluding any of the CDR sequences provided herein. In some embodiments, any of the anti-transferrin receptor antibodies provided herein comprise a heavy chain variable sequence and a light chain variable sequence that comprises a framework sequence that is at least 75%, 80%, 85%, 90%, 95%, 98%, or 99% identical to the framework sequence of any anti-transferrin receptor antibody, such as any one of the anti-transferrin receptor antibodies selected from Table 8.

[0455] In some embodiments, an anti-transferrin receptor antibody, which specifically binds to transferrin receptor (e.g., human transferrin receptor), comprises a light chain variable VL domain comprising any of the CDR-L domains (CDR-L1, CDR-L2, and CDR-L3), or CDR-L domain variants provided herein, of any of the anti-transferrin receptor antibodies selected from Table 8. In some embodiments, an anti-transferrin receptor antibody, which specifically binds to transferrin receptor (e.g., human transferrin receptor), comprises a light chain variable VL domain comprising the CDR-L1, the CDR-L2, and the CDR-L3 of any anti-transferrin receptor antibody, such as any one of the anti-transferrin receptor antibodies selected from Table 8. In some embodiments, the anti-transferrin receptor antibody comprises a light chain variable (VL) region sequence comprising one, two, three or four of the framework regions of the light chain variable region sequence of any anti-transferrin receptor antibody, such as any one of the anti-transferrin receptor antibodies selected from Table 8. In some embodiments, the anti-transferrin receptor antibody comprises one, two, three or four of the framework regions of a light chain variable region sequence which is at least 75%, 80%, 85%, 90%, 95%, or 100% identical to one, two, three or four of the framework regions of the light chain variable region sequence of any anti-transferrin receptor antibody, such as any one of the anti-transferrin receptor antibodies selected from Table 8. In some embodiments, the light chain variable framework region that is derived from said amino acid sequence consists of said amino acid sequence but for the presence of up to 10 amino acid substitutions, deletions, and/or (e.g., and) insertions, preferably up to 10 amino acid substitutions. In some embodiments, the light chain variable framework region that is derived from said amino acid sequence consists of said amino acid sequence with 1, 2, 3, 4, 5, 6, 7, 8, 9 or 10 amino acid residues being substituted for an amino acid found in an analogous position in a corresponding non-human, primate, or human light chain variable framework region.

[0456] In some embodiments, an anti-transferrin receptor antibody that specifically binds to transferrin receptor comprises the CDR-L1, the CDR-L2, and the CDR-L3 of any anti-transferrin receptor antibody, such as any one of the anti-transferrin receptor antibodies selected from Table 8. In some embodiments, the antibody further comprises one, two, three or all four VL framework regions derived from the VL of a human or primate antibody. The primate or human light chain framework region of the antibody selected for use with the light chain CDR sequences described herein, can have, for example, at least 70% (e.g., at least 75%, 80%, 85%, 90%, 95%, 98%, or at least 99%) identity with a light chain framework region of a non-human parent antibody. The primate or human antibody selected can have the same or substantially the same number of amino acids in its light chain complementarity determining regions to that of the light chain complementarity determining regions of any of the antibodies provided herein, e.g., any of the anti-transferrin receptor antibodies selected from Table 8. In some embodiments, the primate or human light chain framework region amino acid residues are from a natural primate or human antibody light chain framework region having at least 75% identity, at least 80% identity, at least 85% identity, at least 90% identity, at least 95% identity, at least 98% identity, at least 99% (or more) identity with the light chain framework regions of any anti-transferrin receptor antibody, such as any one of the anti-transferrin receptor antibodies selected from Table 8. In some embodiments, an anti-transferrin receptor antibody further comprises one, two, three or all four VL framework regions derived from a human light chain variable kappa subfamily. In some embodiments, an anti-transferrin receptor antibody further comprises one, two, three or all four VL framework regions derived from a human light chain variable lambda subfamily.

[0457] In some embodiments, any of the anti-transferrin receptor antibodies provided herein comprise a light chain variable domain that further comprises a light chain constant region. In some embodiments, the light chain constant region is a kappa, or a lambda light chain constant region. In some embodiments, the kappa or lambda light chain constant region is from a mammal, e.g., from a human, monkey, rat, or mouse. In some embodiments, the light chain constant region is a human kappa light chain constant region. In some embodiments, the light chain constant region is a human lambda light chain constant region. It should be appreciated that any of the light chain constant regions provided herein may be variants of any of the light chain constant regions provided herein. In some embodiments, the light chain constant region comprises an amino acid sequence that is at least 75%, 80%, 85%, 90%, 95%, 98%, or 99% identical to any of the light chain constant regions of any anti-transferrin receptor antibody, such as any one of the anti-transferrin receptor antibodies selected from Table 8.

[0458] In some embodiments, the anti-transferrin receptor antibody is any anti-transferrin receptor antibody, such as any one of the anti-transferrin receptor antibodies selected from Table 8.

[0459] In some embodiments, an anti-transferrin receptor antibody comprises a VL domain comprising the amino acid sequence of any anti-transferrin receptor antibody, such as any one of the anti-transferrin receptor antibodies selected from Table 8, and wherein the constant regions comprise the amino acid sequences of the constant regions of an IgG, IgE, IgM, IgD, IgA or IgY immunoglobulin molecule, or a human IgG, IgE, IgM, IgD, IgA or IgY immunoglobulin molecule. In some embodiments, an anti-transferrin receptor antibody comprises any of the VL domains, or VL domain variants, and any of the VH domains, or VH domain variants, wherein the VL and VH domains, or variants thereof, are from the same antibody clone, and wherein the constant regions comprise the amino acid sequences of the constant regions of an IgG, IgE, IgM, IgD, IgA or IgY immunoglobulin molecule, any class (e.g., IgG1, IgG2, IgG3, IgG4, IgA1 and IgA2), or any subclass (e.g., IgG2a and IgG2b) of immunoglobulin molecule. Non-limiting examples of human constant regions are described in the art, e.g., see Kabat E A et al., (1991) supra.

[0460] In some embodiments, the muscle-targeting agent is a transferrin receptor antibody (e.g., the antibody and variants thereof as described in International Application Publication WO 2016/081643, incorporated herein by reference).

[0461] The heavy chain and light chain CDRs of the antibody according to different definition systems are provided in Table 9. The different definition systems, e.g., the Kabat definition, the Chothia definition, and/or (e.g., and) the contact definition have been described. See, e.g., (e.g., Kabat, E. A., et al. (1991) Sequences of Proteins of Immunological Interest, Fifth Edition, U.S. Department of Health and Human Services, NIH Publication No. 91-3242, Chothia et al., (1989) Nature 342:877; Chothia, C. et al. (1987) J. Mol. Biol. 196:901-917, Al-lazikani et al (1997) J. Molec. Biol. 273:927-948; and Almagro, J. Mol. Recognit. 17:132-143 (2004). See also hgmp.mrc.ac.uk and bioinf.org.uk/abs).

TABLE 9
Heavy chain and light chain CDRs of a mouse transferrin receptor antibody

| CDRs | Kabat | Chothia | Contact |
|---|---|---|---|
| CDR-H1 | SYWMH (SEQ ID NO: | GYTFTSY (SEQ ID NO: | TSYWMH (SEQ ID NO: |
| | 216) | 222) | 224) |
| CDR-H2 | EINPTNGRTNYIEKFKS | NPTNGR (SEQ ID NO: | WIGEINPTNGRTN |
| | (SEQ ID NO: 217) | 223) | (SEQ ID NO: 225) |
| CDR-H3 | GTRAYHY (SEQ ID | GTRAYHY (SEQ ID | ARGTRA (SEQ ID NO: |
| | NO: 218) | NO: 218) | 226) |
| CDR-L1 | RASDNLYSNLA (SEQ | RASDNLYSNLA (SEQ | YSNLAWY (SEQ ID |
| | ID NO: 219) | ID NO: 219) | NO: 227) |
| CDR-L2 | DATNLAD (SEQ ID NO: | DATNLAD (SEQ ID NO: | LLVYDATNLA (SEQ ID |
| | 220) | 220) | NO: 228) |
| CDR-L3 | QHFWGTPLT (SEQ ID | QHFWGTPLT (SEQ ID | QHFWGTPL (SEQ ID |
| | NO: 221) | NO: 221) | NO: 229) |

[0462] The heavy chain variable domain (VH) and light chain variable domain sequences are also provided:

VH
(SEQ ID NO: 230)
QVQLQQPGAELVKPGASVKLSCKASGYTFTSYWMHWVKQRPGQGLEWIG
EINPTNGRTNYIEKFKSKATLTVDKSSSTAYMQLSSLTSEDSAVYYCAR
GTRAYHYWGQGTSVTVSS
VL
(SEQ ID NO: 231)
DIQMTQSPASLSVSVGETVTITCRASDNLYSNLAWYQQKQGKSPQLLVY
DATNLADGVPSRFSGSGSGTQYSLKINSLQSEDFGTYYCQHFWGTPLTF
GAGTKLELK

[0463] In some embodiments, the transferrin receptor antibody of the present disclosure comprises a CDR-H1, a CDR-H2, and a CDR-H3 that are the same as the CDR-H1, CDR-H2, and CDR-H3 shown in Table 9. Alternatively or in addition (e.g., in addition), the transferrin receptor antibody of the present disclosure comprises a CDR-L1, a CDR-L2, and a CDR-L3 that are the same as the CDR-L1, CDR-L2, and CDR-L3 shown in Table 9.

[0464] In some embodiments, the transferrin receptor antibody of the present disclosure comprises a CDR-H1, a CDR-H2, and a CDR-H3, which collectively contains no more than 5 amino acid variations (e.g., no more than 5, 4, 3, 2, or 1 amino acid variation) as compared with the CDR-H1, CDR-H2, and CDR-H3 as shown in Table 9. “Collectively” means that the total number of amino acid variations in all of the three heavy chain CDRs is within the defined range. Alternatively or in addition (e.g., in addition), the transferrin receptor antibody of the present disclosure may comprise a CDR-L1, a CDR-L2, and a CDR-L3, which collectively contains no more than 5 amino acid variations (e.g., no more than 5, 4, 3, 2 or 1 amino acid variation) as compared with the CDR-L1, CDR-L2, and CDR-L3 as shown in Table 9.

[0465] In some embodiments, the transferrin receptor antibody of the present disclosure comprises a CDR-H1, a CDR-H2, and a CDR-H3, at least one of which contains no more than 3 amino acid variations (e.g., no more than 3, 2, or 1 amino acid variation) as compared with the counterpart heavy chain CDR as shown in Table 9. Alternatively or in addition (e.g., in addition), the transferrin receptor antibody of the present disclosure may comprise CDR-L1, a CDR-L2, and a CDR-L3, at least one of which contains no more than 3 amino acid variations (e.g., no more than 3, 2, or 1 amino acid variation) as compared with the counterpart light chain CDR as shown in Table 9.

[0466] In some embodiments, the transferrin receptor antibody of the present disclosure comprises a CDR-L3, which contains no more than 3 amino acid variations (e.g., no more than 3, 2, or 1 amino acid variation) as compared with the CDR-L3 as shown in Table 9. In some embodiments, the transferrin receptor antibody of the present disclosure comprises a CDR-L3 containing one amino acid variation as compared with the CDR-L3 as shown in Table 9. In some embodiments, the transferrin receptor antibody of the present disclosure comprises a CDR-L3 of QHFAGTPLT (SEQ ID NO: 232) according to the Kabat and Chothia definition system) or QHFAGTPL (SEQ ID NO: 233) according to the Contact definition system). In some embodiments, the transferrin receptor antibody of the present disclosure comprises a CDR-H1, a CDR-H2, a CDR-H3, a CDR-L1 and a CDR-L2 that are the same as the CDR-H1, CDR-H2, and CDR-H3 shown in Table 9, and comprises a CDR-L3 of QHFAGTPLT (SEQ ID NO: 232) according to the Kabat and Chothia definition system) or QHFAGTPL (SEQ ID NO: 233) according to the Contact definition system).

[0467] In some embodiments, the transferrin receptor antibody of the present disclosure comprises heavy chain CDRs that collectively are at least 80% (e.g., 80%, 85%, 90%, 95%, or 98%) identical to the heavy chain CDRs as shown in Table 9. Alternatively or in addition (e.g., in addition), the transferrin receptor antibody of the present disclosure comprises light chain CDRs that collectively are at least 80% (e.g., 80%, 85%, 90%, 95%, or 98%) identical to the light chain CDRs as shown in Table 9.

[0468] In some embodiments, the transferrin receptor antibody of the present disclosure comprises a VH comprising the amino acid sequence of SEQ ID NO: 230. Alternatively or in addition (e.g., in addition), the transferrin receptor antibody of the present disclosure comprises a VL comprising the amino acid sequence of SEQ ID NO: 231.

[0469] In some embodiments, the transferrin receptor antibody of the present disclosure comprises a VH containing no more than 25 amino acid variations (e.g., no more than 25, 24, 23, 22, 21, 20, 19, 18, 17, 16, 15, 14, 13, 12, 11, 10, 9, 8, 7, 6, 5, 4, 3, 2, or 1 amino acid variation) as compared with the VH as set forth in SEQ ID NO: 230. Alternatively or in addition (e.g., in addition), the transferrin receptor antibody of the present disclosure comprises a VL containing no more than 15 amino acid variations (e.g., no more than 20, 19, 18, 17, 16, 15, 14, 13, 12, 11, 9, 8, 7, 6, 5, 4, 3, 2, or 1 amino acid variation) as compared with the VL as set forth in SEQ ID NO: 231.

[0470] In some embodiments, the transferrin receptor antibody of the present disclosure comprises a VH comprising an amino acid sequence that is at least 80% (e.g., 80%, 85%, 90%, 95%, or 98%) identical to the VH as set forth in SEQ ID NO: 230. Alternatively or in addition (e.g., in addition), the transferrin receptor antibody of the present disclosure comprises a VL comprising an amino acid sequence that is at least 80% (e.g., 80%, 85%, 90%, 95%, or 98%) identical to the VL as set forth in SEQ ID NO: 231.

[0471] In some embodiments, the transferrin receptor antibody of the present disclosure is a humanized antibody (e.g., a humanized variant of an antibody). In some embodiments, the transferrin receptor antibody of the present disclosure comprises a CDR-H1, a CDR-H2, a CDR-H3, a CDR-L1, a CDR-L2, and a CDR-L3 that are the same as the CDR-H1, CDR-H2, and CDR-H3 shown in Table 9, and comprises a humanized heavy chain variable region and/or (e.g., and) a humanized light chain variable region.

[0472] Humanized antibodies are human immunoglobulins (recipient antibody) in which residues from a complementary determining region (CDR) of the recipient are replaced by residues from a CDR of a non-human species (donor antibody) such as mouse, rat, or rabbit having the desired specificity, affinity, and capacity. In some embodiments, Fv framework region (FR) residues of the human immunoglobulin are replaced by corresponding non-human residues. Furthermore, the humanized antibody may comprise residues that are found neither in the recipient antibody nor in the imported CDR or framework sequences, but are included to further refine and optimize antibody performance. In general, the humanized antibody will comprise substantially all of at least one, and typically two, variable domains, in which all or substantially all of the CDR regions correspond to those of a non-human immunoglobulin and all or substantially all of the FR regions are those of a human immunoglobulin consensus sequence. The humanized antibody optimally also will comprise at least a portion of an immunoglobulin constant region or domain (Fc), typically that of a human immunoglobulin. Antibodies may have Fc regions modified as described in WO 99/58572. Other forms of humanized antibodies have one or more CDRs (one, two, three, four, five, six) which are altered with respect to the original antibody, which are also termed one or more CDRs derived from one or more CDRs from the original antibody. Humanized antibodies may also involve affinity maturation.

[0473] In some embodiments, humanization is achieved by grafting the CDRs (e.g., as shown in Table 9) into the IGKV1-NL1*01 and IGHV1-3*01 human variable domains. In some embodiments, the transferrin receptor antibody of the present disclosure is a humanized variant comprising one or more amino acid substitutions at positions 9, 13, 17, 18, 40, 45, and 70 as compared with the VL as set forth in SEQ ID NO: 231, and/or (e.g., and) one or more amino acid substitutions at positions 1, 5, 7, 11, 12, 20, 38, 40, 44, 66, 75, 81, 83, 87, and 108 as compared with the VH as set forth in SEQ ID NO: 230. In some embodiments, the transferrin receptor antibody of the present disclosure is a humanized variant comprising amino acid substitutions at all of positions 9, 13, 17, 18, 40, 45, and 70 as compared with the VL as set forth in SEQ ID NO: 231, and/or (e.g., and) amino acid substitutions at all of positions 1, 5, 7, 11, 12, 20, 38, 40, 44, 66, 75, 81, 83, 87, and 108 as compared with the VH as set forth in SEQ ID NO: 230.

[0474] In some embodiments, the transferrin receptor antibody of the present disclosure is a humanized antibody and contains the residues at positions 43 and 48 of the VL as set forth in SEQ ID NO: 231. Alternatively or in addition (e.g., in addition), the transferrin receptor antibody of the present disclosure is a humanized antibody and contains the residues at positions 48, 67, 69, 71, and 73 of the VH as set forth in SEQ ID NO: 230.

[0475] The VH and VL amino acid sequences of an example humanized antibody that may be used in accordance with the present disclosure are provided:

Humanized VH
(SEQ ID NO: 234)
EVQLVQSGAEVKKPGASVKVSCKASGYTFTSYWMHWVRQAPGQRLEWIG
EINPTNGRTNYIEKFKSRATLTVDKSASTAYMELSSLRSEDTAVYYCAR
GTRAYHYWGQGTMVTVSS
Humanized VL
(SEQ ID NO: 235)
DIQMTQSPSSLSASVGDRVTITCRASDNLYSNLAWYQQKPGKSPKLLVY
DATNLADGVPSRFSGSGSGTDYTLTISSLQPEDFATYYCQHFWGTPLTF
GQGTKVEIK

[0476] In some embodiments, the transferrin receptor antibody of the present disclosure comprises a VH comprising the amino acid sequence of SEQ ID NO: 234. Alternatively or in addition (e.g., in addition), the transferrin receptor antibody of the present disclosure comprises a VL comprising the amino acid sequence of SEQ ID NO: 235.

[0477] In some embodiments, the transferrin receptor antibody of the present disclosure comprises a VH containing no more than 25 amino acid variations (e.g., no more than 25, 24, 23, 22, 21, 20, 19, 18, 17, 16, 15, 14, 13, 12, 11, 10, 9, 8, 7, 6, 5, 4, 3, 2, or 1 amino acid variation) as compared with the VH as set forth in SEQ ID NO: 234. Alternatively or in addition (e.g., in addition), the transferrin receptor antibody of the present disclosure comprises a VL containing no more than 15 amino acid variations (e.g., no more than 20, 19, 18, 17, 16, 15, 14, 13, 12, 11, 9, 8, 7, 6, 5, 4, 3, 2, or 1 amino acid variation) as compared with the VL as set forth in SEQ ID NO: 235.

[0478] In some embodiments, the transferrin receptor antibody of the present disclosure comprises a VH comprising an amino acid sequence that is at least 80% (e.g., 80%, 85%, 90%, 95%, or 98%) identical to the VH as set forth in SEQ ID NO: 234. Alternatively or in addition (e.g., in addition), the transferrin receptor antibody of the present disclosure comprises a VL comprising an amino acid sequence that is at least 80% (e.g., 80%, 85%, 90%, 95%, or 98%) identical to the VL as set forth in SEQ ID NO: 235.

[0479] In some embodiments, the transferrin receptor antibody of the present disclosure is a humanized variant comprising amino acid substitutions at one or more of positions 43 and 48 as compared with the VL as set forth in SEQ ID NO: 231, and/or (e.g., and) amino acid substitutions at one or more of positions 48, 67, 69, 71, and 73 as compared with the VH as set forth in SEQ ID NO: 230. In some embodiments, the transferrin receptor antibody of the present disclosure is a humanized variant comprising a S43A and/or (e.g., and) a V48L mutation as compared with the VL as set forth in SEQ ID NO: 231, and/or (e.g., and) one or more of A67V, L69I, V71R, and K73T mutations as compared with the VH as set forth in SEQ ID NO: 230

[0480] In some embodiments, the transferrin receptor antibody of the present disclosure is a humanized variant comprising amino acid substitutions at one or more of positions 9, 13, 17, 18, 40, 43, 48, 45, and 70 as compared with the VL as set forth in SEQ ID NO: 231, and/or (e.g., and) amino acid substitutions at one or more of positions 1, 5, 7, 11, 12, 20, 38, 40, 44, 48, 66, 67, 69, 71, 73, 75, 81, 83, 87, and 108 as compared with the VH as set forth in SEQ ID NO: 230.

[0481] In some embodiments, the transferrin receptor antibody of the present disclosure is a chimeric antibody, which can include a heavy constant region and a light constant region from a human antibody. Chimeric antibodies refer to antibodies having a variable region or part of variable region from a first species and a constant region from a second species. Typically, in these chimeric antibodies, the variable region of both light and heavy chains mimics the variable regions of antibodies derived from one species of mammals (e.g., a non-human mammal such as mouse, rabbit, and rat), while the constant portions are homologous to the sequences in antibodies derived from another mammal such as human. In some embodiments, amino acid modifications can be made in the variable region and/or (e.g., and) the constant region.

[0482] In some embodiments, the transferrin receptor antibody described herein is a chimeric antibody, which can include a heavy constant region and a light constant region from a human antibody. Chimeric antibodies refer to antibodies having a variable region or part of variable region from a first species and a constant region from a second species. Typically, in these chimeric antibodies, the variable region of both light and heavy chains mimics the variable regions of antibodies derived from one species of mammals (e.g., a non-human mammal such as mouse, rabbit, and rat), while the constant portions are homologous to the sequences in antibodies derived from another mammal such as human. In some embodiments, amino acid modifications can be made in the variable region and/or (e.g., and) the constant region.

[0483] In some embodiments, the heavy chain of any of the transferrin receptor antibodies as described herein may comprises a heavy chain constant region (CH) or a portion thereof (e.g., CH1, CH2, CH3, or a combination thereof). The heavy chain constant region can of any suitable origin, e.g., human, mouse, rat, or rabbit. In one specific example, the heavy chain constant region is from a human IgG (a gamma heavy chain), e.g., IgG1, IgG2, or IgG4. An example of human IgG1 constant region is given below:

(SEQ ID NO: 175)
[sequence omitted]

[0484] In some embodiments, the light chain of any of the transferrin receptor antibodies described herein may further comprise a light chain constant region (CL), which can be any CL known in the art. In some examples, the CL is a kappa light chain. In other examples, the CL is a lambda light chain. In some embodiments, the CL is a kappa light chain, the sequence of which is provided below:

(SEQ ID NO: 177)
RTVAAPSVFIFPPSDEQLKSGTASVVCLLNNFYPREAKVQWKVDNALQS
GNSQESVTEQDSKDSTYSLSSTLTLSKADYEKHKVYACEVTHQGLSSPV
TKSFNRGEC

[0485] Other antibody heavy and light chain constant regions are well known in the art, e.g., those provided in the IMGT database (www.imgt.org) or at www.vbase2.org/vbstat.php., both of which are incorporated by reference herein.

[0486] Examples of heavy chain and light chain amino acid sequences of the transferrin receptor antibodies described are provided below:

Heavy Chain (VH + human IgG1 constant region)
(SEQ ID NO: 236)
QVQLQQPGAELVKPGASVKLSCKASGYTFTSYWMHWVKQRPGQGLEWIG
EINPTNGRTNYIEKFKSKATLTVDKSSSTAYMQLSSLTSEDSAVYYCAR
GTRAYHYWGQGTSVTVSSASTKGPSVFPLAPSSKSTSGGTAALGCLVKD
YFPEPVTVSWNSGALTSGVHTFPAVLQSSGLYSLSSVVTVPSSSLGTQT
YICNVNHKPSNTKVDKKVEPKSCDKTHTCPPCPAPELLGGPSVFLFPPK
PKDTLMISRTPEVTCVVVDVSHEDPEVKFNWYVDGVEVHNAKTKPREEQ
YNSTYRVVSVLTVLHQDWLNGKEYKCKVSNKALPAPIEKTISKAKGQPR
EPQVYTLPPSRDELTKNQVSLTCLVKGFYPSDIAVEWESNGQPENNYKT
TPPVLDSDGSFFLYSKLTVDKSRWQQGNVFSCSVMHEALHNHYTQKSLS
LSPGK
Light Chain (VL + kappa light chain)
(SEQ ID NO: 237)
DIQMTQSPASLSVSVGETVTITCRASDNLYSNLAWYQQKQGKSPQLLVY
DATNLADGVPSRFSGSGSGTQYSLKINSLQSEDFGTYYCQHFWGTPLTF
GAGTKLELKRTVAAPSVFIFPPSDEQLKSGTASVVCLLNNFYPREAKVQ
WKVDNALQSGNSQESVTEQDSKDSTYSLSSTLTLSKADYEKHKVYACEV
THQGLSSPVTKSFNRGEC
Heavy Chain (humanized VH + human IgG1 constant
region)
(SEQ ID NO: 238)
EVQLVQSGAEVKKPGASVKVSCKASGYTFTSYWMHWVRQAPGQRLEWIG
EINPTNGRTNYIEKFKSRATLTVDKSASTAYMELSSLRSEDTAVYYCAR
GTRAYHYWGQGTMVTVSSASTKGPSVFPLAPSSKSTSGGTAALGCLVKD
YFPEPVTVSWNSGALTSGVHTFPAVLQSSGLYSLSSVVTVPSSSLGTQT
YICNVNHKPSNTKVDKKVEPKSCDKTHTCPPCPAPELLGGPSVFLFPPK
PKDTLMISRTPEVTCVVVDVSHEDPEVKFNWYVDGVEVHNAKTKPREEQ
YNSTYRVVSVLTVLHQDWLNGKEYKCKVSNKALPAPIEKTISKAKGQPR
EPQVYTLPPSRDELTKNQVSLTCLVKGFYPSDIAVEWESNGQPENNYKT
TPPVLDSDGSFFLYSKLTVDKSRWQQGNVFSCSVMHEALHNHYTQKSLS
LSPGK
Light Chain (humanized VL + kappa light chain)
(SEQ ID NO: 239)
DIQMTQSPSSLSASVGDRVTITCRASDNLYSNLAWYQQKPGKSPKLLVY
DATNLADGVPSRFSGSGSGTDYTLTISSLQPEDFATYYCQHFWGTPLTF
GQGTKVEIKRTVAAPSVFIFPPSDEQLKSGTASVVCLLNNFYPREAKVQ
WKVDNALQSGNSQESVTEQDSKDSTYSLSSTLTLSKADYEKHKVYACEV
THQGLSSPVTKSFNRGEC

[0487] In some embodiments, the transferrin receptor antibody described herein comprises a heavy chain comprising an amino acid sequence that is at least 80% (e.g., 80%, 85%, 90%, 95%, or 98%) identical to SEQ ID NO: 236. Alternatively or in addition (e.g., in addition), the transferrin receptor antibody described herein comprises a light chain comprising an amino acid sequence that is at least 80% (e.g., 80%, 85%, 90%, 95%, or 98%) identical to SEQ ID NO: 237. In some embodiments, the transferrin receptor antibody described herein comprises a heavy chain comprising the amino acid sequence of SEQ ID NO: 236. Alternatively or in addition (e.g., in addition), the transferrin receptor antibody described herein comprises a light chain comprising the amino acid sequence of SEQ ID NO: 237.

[0488] In some embodiments, the transferrin receptor antibody of the present disclosure comprises a heavy chain containing no more than 25 amino acid variations (e.g., no more than 25, 24, 23, 22, 21, 20, 19, 18, 17, 16, 15, 14, 13, 12, 11, 10, 9, 8, 7, 6, 5, 4, 3, 2, or 1 amino acid variation) as compared with the heavy chain as set forth in SEQ ID NO: 236. Alternatively or in addition (e.g., in addition), the transferrin receptor antibody of the present disclosure comprises a light chain containing no more than 15 amino acid variations (e.g., no more than 20, 19, 18, 17, 16, 15, 14, 13, 12, 11, 9, 8, 7, 6, 5, 4, 3, 2, or 1 amino acid variation) as compared with the light chain as set forth in SEQ ID NO: 237.

[0489] In some embodiments, the transferrin receptor antibody described herein comprises a heavy chain comprising an amino acid sequence that is at least 80% (e.g., 80%, 85%, 90%, 95%, or 98%) identical to SEQ ID NO: 238. Alternatively or in addition (e.g., in addition), the transferrin receptor antibody described herein comprises a light chain comprising an amino acid sequence that is at least 80% (e.g., 80%, 85%, 90%, 95%, or 98%) identical to SEQ ID NO: 239. In some embodiments, the transferrin receptor antibody described herein comprises a heavy chain comprising the amino acid sequence of SEQ ID NO: 238. Alternatively or in addition (e.g., in addition), the transferrin receptor antibody described herein comprises a light chain comprising the amino acid sequence of SEQ ID NO: 239.

[0490] In some embodiments, the transferrin receptor antibody of the present disclosure comprises a heavy chain containing no more than 25 amino acid variations (e.g., no more than 25, 24, 23, 22, 21, 20, 19, 18, 17, 16, 15, 14, 13, 12, 11, 10, 9, 8, 7, 6, 5, 4, 3, 2, or 1 amino acid variation) as compared with the heavy chain of humanized antibody as set forth in SEQ ID NO: 238. Alternatively or in addition (e.g., in addition), the transferrin receptor antibody of the present disclosure comprises a light chain containing no more than 15 amino acid variations (e.g., no more than 20, 19, 18, 17, 16, 15, 14, 13, 12, 11, 9, 8, 7, 6, 5, 4, 3, 2, or 1 amino acid variation) as compared with the light chain of humanized antibody as set forth in SEQ ID NO: 239.

[0491] In some embodiments, the transferrin receptor antibody is an antigen binding fragment (FAB) of an intact antibody (full-length antibody). Antigen binding fragment of an intact antibody (full-length antibody) can be prepared via routine methods. For example, F(ab′)2 fragments can be produced by pepsin digestion of an antibody molecule, and Fab fragments that can be generated by reducing the disulfide bridges of F(ab′)2 fragments. Examples of FABs amino acid sequences of the transferrin receptor antibodies described herein are provided below:

Heavy Chain FAB (VH + a portion of human IgG1
constant region)
(SEQ ID NO: 240)
QVQLQQPGAELVKPGASVKLSCKASGYTFTSYWMHWVKQRPGQGLEWIG
EINPTNGRTNYIEKFKSKATLTVDKSSSTAYMQLSSLTSEDSAVYYCAR
GTRAYHYWGQGTSVTVSSASTKGPSVFPLAPSSKSTSGGTAALGCLVKD
YFPEPVTVSWNSGALTSGVHTFPAVLQSSGLYSLSSVVTVPSSSLGTQT
YICNVNHKPSNTKVDKKVEPKSCDKTHTCP
Heavy Chain FAB (humanized VH + a portion of
human IgG1 constant region)
(SEQ ID NO: 241)
EVQLVQSGAEVKKPGASVKVSCKASGYTFTSYWMHWVRQAPGQRLEWIG
EINPTNGRTNYIEKFKSRATLTVDKSASTAYMELSSLRSEDTAVYYCAR
GTRAYHYWGQGTMVTVSSASTKGPSVFPLAPSSKSTSGGTAALGCLVKD
YFPEPVTVSWNSGALTSGVHTFPAVLQSSGLYSLSSVVTVPSSSLGTQT
YICNVNHKPSNTKVDKKVEPKSCDKTHTCP

[0492] In some embodiments, the transferrin receptor antibody described herein comprises a heavy chain comprising the amino acid sequence of SEQ ID NO: 240. Alternatively or in addition (e.g., in addition), the transferrin receptor antibody described herein comprises a light chain comprising the amino acid sequence of SEQ ID NO: 237.

[0493] In some embodiments, the transferrin receptor antibody described herein comprises a heavy chain comprising the amino acid sequence of SEQ ID NO: 241. Alternatively or in addition (e.g., in addition), the transferrin receptor antibody described herein comprises a light chain comprising the amino acid sequence of SEQ ID NO: 239.

[0494] The transferrin receptor antibodies described herein can be in any antibody form, including, but not limited to, intact (i.e., full-length) antibodies, antigen-binding fragments thereof (such as Fab, Fab′, F(ab′)2, Fv), single chain antibodies, bi-specific antibodies, or nanobodies. In some embodiments, the transferrin receptor antibody described herein is a scFv. In some embodiments, the transferrin receptor antibody described herein is a scFv-Fab (e.g., scFv fused to a portion of a constant region). In some embodiments, the transferrin receptor antibody described herein is a scFv fused to a constant region (e.g., human IgG1 constant region as set forth in SEQ ID NO: 175).

[0495] In some embodiments, the anti-TfR antibody of the present disclosure is a humanized antibody comprising human framework regions with the CDRs of a murine antibody listed in Table 2 or Table 4 (e.g., 3A4, 3M12, or 5H12). In some embodiments, the anti-TfR antibody of the present disclosure is an IgG1 kappa that comprises human framework regions with the CDRs of a murine antibody listed in Table 2 or Table 4 (e.g., 3A4, 3M12, or 5H12). In some embodiments, the anti-TfR antibody of the present disclosure is a Fab′ fragment of an IgG1 kappa that comprises human framework regions with the CDRs of a murine antibody listed in Table 1 or Table 3 (e.g., 3A4, 3M12, or 5H12). In some embodiments, the anti-TfR antibody of the present disclose comprises the CDRs of the antibody provided in Table 7. In some embodiments, the anti-TfR antibody of the present disclosure is an IgG1 kappa that comprises the variable regions of the antibody provided in Table 7. In some embodiments, the anti-TfR antibody of the present disclosure is a Fab′ fragment of an IgG1 kappa that comprises the variable regions of the antibody provided in Table 7.

[0496] In some embodiments, any one of the anti-TfR antibodies described herein is produced by recombinant DNA technology in Chinese hamster ovary (CHO) cell suspension culture, optionally in CHO-K1 cell (e.g., CHO-K1 cells derived from European Collection of Animal Cell Culture, Cat. No. 85051005) suspension culture.

[0497] In some embodiments, an antibody provided herein may have one or more post-translational modifications. In some embodiments, N-terminal cyclization, also called pyroglutamate formation (pyro-Glu), may occur in the antibody at N-terminal Glutamate (Glu) and/or Glutamine (Gln) residues during production. In some embodiments, pyroglutamate formation occurs in a heavy chain sequence. In some embodiments, pyroglutamate formation occurs in a light chain sequence.

[0498] b. Other Muscle-Targeting Antibodies

[0499] In some embodiments, the muscle-targeting antibody is an antibody that specifically binds hemojuvelin, caveolin-3, Duchenne muscular dystrophy peptide, myosin Iib, or CD63. In some embodiments, the muscle-targeting antibody is an antibody that specifically binds a myogenic precursor protein. Exemplary myogenic precursor proteins include, without limitation, ABCG2, M-Cadherin/Cadherin-15, Caveolin-1, CD34, FoxK1, Integrin alpha 7, Integrin alpha 7 beta 1, MYF-5, MyoD, Myogenin, NCAM-1/CD56, Pax3, Pax7, and Pax9. In some embodiments, the muscle-targeting antibody is an antibody that specifically binds a skeletal muscle protein. Exemplary skeletal muscle proteins include, without limitation, alpha-Sarcoglycan, beta-Sarcoglycan, Calpain Inhibitors, Creatine Kinase MM/CKMM, eIF5A, Enolase 2/Neuron-specific Enolase, epsilon-Sarcoglycan, FABP3/H-FABP, GDF-8/Myostatin, GDF-11/GDF-8, Integrin alpha 7, Integrin alpha 7 beta 1, Integrin beta 1/CD29, MCAM/CD146, MyoD, Myogenin, Myosin Light Chain Kinase Inhibitors, NCAM-1/CD56, and Troponin I. In some embodiments, the muscle-targeting antibody is an antibody that specifically binds a smooth muscle protein. Exemplary smooth muscle proteins include, without limitation, alpha-Smooth Muscle Actin, VE-Cadherin, Caldesmon/CALD1, Calponin 1, Desmin, Histamine H2 R, Motilin R/GPR38, Transgelin/TAGLN, and Vimentin. However, it should be appreciated that antibodies to additional targets are within the scope of this disclosure and the exemplary lists of targets provided herein are not meant to be limiting.

[0500] c. Antibody Features/Alterations

[0501] In some embodiments, conservative mutations can be introduced into antibody sequences (e.g., CDRs or framework sequences) at positions where the residues are not likely to be involved in interacting with a target antigen (e.g., transferrin receptor), for example, as determined based on a crystal structure. In some embodiments, one, two or more mutations (e.g., amino acid substitutions) are introduced into the Fc region of a muscle-targeting antibody described herein (e.g., in a CH2 domain (residues 231-340 of human IgG1) and/or (e.g., and) CH3 domain (residues 341-447 of human IgG1) and/or (e.g., and) the hinge region, with numbering according to the Kabat numbering system (e.g., the EU index in Kabat)) to alter one or more functional properties of the antibody, such as serum half-life, complement fixation, Fc receptor binding and/or (e.g., and) antigen-dependent cellular cytotoxicity.

[0502] In some embodiments, one, two or more mutations (e.g., amino acid substitutions) are introduced into the hinge region of the Fc region (CH1 domain) such that the number of cysteine residues in the hinge region are altered (e.g., increased or decreased) as described in, e.g., U.S. Pat. No. 5,677,425. The number of cysteine residues in the hinge region of the CH1 domain can be altered to, e.g., facilitate assembly of the light and heavy chains, or to alter (e.g., increase or decrease) the stability of the antibody or to facilitate linker conjugation.

[0503] In some embodiments, one, two or more mutations (e.g., amino acid substitutions) are introduced into the Fc region of a muscle-targeting antibody described herein (e.g., in a CH2 domain (residues 231-340 of human IgG1) and/or (e.g., and) CH3 domain (residues 341-447 of human IgG1) and/or (e.g., and) the hinge region, with numbering according to the Kabat numbering system (e.g., the EU index in Kabat)) to increase or decrease the affinity of the antibody for an Fc receptor (e.g., an activated Fc receptor) on the surface of an effector cell. Mutations in the Fc region of an antibody that decrease or increase the affinity of an antibody for an Fc receptor and techniques for introducing such mutations into the Fc receptor or fragment thereof are known to one of skill in the art. Examples of mutations in the Fc receptor of an antibody that can be made to alter the affinity of the antibody for an Fc receptor are described in, e.g., Smith P et al., (2012) PNAS 109: 6181-6186, U.S. Pat. No. 6,737,056, and International Publication Nos. WO 02/060919; WO 98/23289; and WO 97/34631, which are incorporated herein by reference.

[0504] In some embodiments, one, two or more amino acid mutations (i.e., substitutions, insertions or deletions) are introduced into an IgG constant domain, or FcRn-binding fragment thereof (preferably an Fc or hinge-Fc domain fragment) to alter (e.g., decrease or increase) half-life of the antibody in vivo. See, e.g., International Publication Nos. WO 02/060919; WO 98/23289; and WO 97/34631; and U.S. Pat. Nos. 5,869,046, 6,121,022, 6,277,375 and 6,165,745 for examples of mutations that will alter (e.g., decrease or increase) the half-life of an antibody in vivo.

[0505] In some embodiments, one, two or more amino acid mutations (i.e., substitutions, insertions or deletions) are introduced into an IgG constant domain, or FcRn-binding fragment thereof (preferably an Fc or hinge-Fc domain fragment) to decrease the half-life of the anti-transferrin receptor antibody in vivo. In some embodiments, one, two or more amino acid mutations (i.e., substitutions, insertions or deletions) are introduced into an IgG constant domain, or FcRn-binding fragment thereof (preferably an Fc or hinge-Fc domain fragment) to increase the half-life of the antibody in vivo. In some embodiments, the antibodies can have one or more amino acid mutations (e.g., substitutions) in the second constant (CH2) domain (residues 231-340 of human IgG1) and/or (e.g., and) the third constant (CH3) domain (residues 341-447 of human IgG1), with numbering according to the EU index in Kabat (Kabat E A et al., (1991) supra). In some embodiments, the constant region of the IgG1 of an antibody described herein comprises a methionine (M) to tyrosine (Y) substitution in position 252, a serine (S) to threonine (T) substitution in position 254, and a threonine (T) to glutamic acid (E) substitution in position 256, numbered according to the EU index as in Kabat. See U.S. Pat. No. 7,658,921, which is incorporated herein by reference. This type of mutant IgG, referred to as “YTE mutant” has been shown to display fourfold increased half-life as compared to wild-type versions of the same antibody (see Dall'Acqua W F et al., (2006) J Biol Chem 281: 23514-24). In some embodiments, an antibody comprises an IgG constant domain comprising one, two, three or more amino acid substitutions of amino acid residues at positions 251-257, 285-290, 308-314, 385-389, and 428-436, numbered according to the EU index as in Kabat.

[0506] In some embodiments, one, two or more amino acid substitutions are introduced into an IgG constant domain Fc region to alter the effector function(s) of the anti-transferrin receptor antibody. The effector ligand to which affinity is altered can be, for example, an Fc receptor or the C1 component of complement. This approach is described in further detail in U.S. Pat. Nos. 5,624,821 and 5,648,260. In some embodiments, the deletion or inactivation (through point mutations or other means) of a constant region domain can reduce Fc receptor binding of the circulating antibody thereby increasing tumor localization. See, e.g., U.S. Pat. Nos. 5,585,097 and 8,591,886 for a description of mutations that delete or inactivate the constant domain and thereby increase tumor localization. In some embodiments, one or more amino acid substitutions may be introduced into the Fc region of an antibody described herein to remove potential glycosylation sites on Fc region, which may reduce Fc receptor binding (see, e.g., Shields R L et al., (2001) J Biol Chem 276: 6591-604).

[0507] In some embodiments, one or more amino in the constant region of a muscle-targeting antibody described herein can be replaced with a different amino acid residue such that the antibody has altered C1q binding and/or (e.g., and) reduced or abolished complement dependent cytotoxicity (CDC). This approach is described in further detail in U.S. Pat. No. 6,194,551 (Idusogie et al). In some embodiments, one or more amino acid residues in the N-terminal region of the CH2 domain of an antibody described herein are altered to thereby alter the ability of the antibody to fix complement. This approach is described further in International Publication No. WO 94/29351. In some embodiments, the Fc region of an antibody described herein is modified to increase the ability of the antibody to mediate antibody dependent cellular cytotoxicity (ADCC) and/or (e.g., and) to increase the affinity of the antibody for an Fey receptor. This approach is described further in International Publication No. WO 00/42072.

[0508] In some embodiments, the heavy and/or (e.g., and) light chain variable domain(s) sequence(s) of the antibodies provided herein can be used to generate, for example, CDR-grafted, chimeric, humanized, or composite human antibodies or antigen-binding fragments, as described elsewhere herein. As understood by one of ordinary skill in the art, any variant, CDR-grafted, chimeric, humanized, or composite antibodies derived from any of the antibodies provided herein may be useful in the compositions and methods described herein and will maintain the ability to specifically bind transferrin receptor, such that the variant, CDR-grafted, chimeric, humanized, or composite antibody has at least 50%, at least 60%, at least 70%, at least 80%, at least 90%, at least 95% or more binding to transferrin receptor relative to the original antibody from which it is derived.

[0509] In some embodiments, the antibodies provided herein comprise mutations that confer desirable properties to the antibodies. For example, to avoid potential complications due to Fab-arm exchange, which is known to occur with native IgG4 mAbs, the antibodies provided herein may comprise a stabilizing ‘Adair’ mutation (Angal S., et al., “A single amino acid substitution abolishes the heterogeneity of chimeric mouse/human (IgG4) antibody,” Mol Immunol 30, 105-108; 1993), where serine 228 (EU numbering; residue 241 Kabat numbering) is converted to proline resulting in an IgG1-like hinge sequence. Accordingly, any of the antibodies may include a stabilizing ‘Adair’ mutation.

[0510] As provided herein, antibodies of this disclosure may optionally comprise constant regions or parts thereof. For example, a VL domain may be attached at its C-terminal end to a light chain constant domain like Cκ or Cλ. Similarly, a VH domain or portion thereof may be attached to all or part of a heavy chain like IgA, IgD, IgE, IgG, and IgM, and any isotype subclass. Antibodies may include suitable constant regions (see, for example, Kabat et al., Sequences of Proteins of Immunological Interest, No. 91-3242, National Institutes of Health Publications, Bethesda, Md. (1991)). Therefore, antibodies within the scope of this may disclosure include VH and VL domains, or an antigen binding portion thereof, combined with any suitable constant regions.

[0511] ii. Muscle-Targeting Peptides

[0512] Some aspects of the disclosure provide muscle-targeting peptides as muscle-targeting agents. Short peptide sequences (e.g., peptide sequences of 5-20 amino acids in length) that bind to specific cell types have been described. For example, cell-targeting peptides have been described in Vines e., et al., A. “Cell-penetrating and cell-targeting peptides in drug delivery” Biochim Biophys Acta 2008, 1786: 126-38; Jarver P., et al., “In vivo biodistribution and efficacy of peptide mediated delivery” Trends Pharmacol Sci 2010; 31: 528-35; Samoylova T. I., et al., “Elucidation of muscle-binding peptides by phage display screening” Muscle Nerve 1999; 22: 460-6; U.S. Pat. No. 6,329,501, issued on Dec. 11, 2001, entitled “METHODS AND COMPOSITIONS FOR TARGETING COMPOUNDS TO MUSCLE”; and Samoylov A. M., et al., “Recognition of cell-specific binding of phage display derived peptides using an acoustic wave sensor.” Biomol Eng 2002; 18: 269-72; the entire contents of each of which are incorporated herein by reference. By designing peptides to interact with specific cell surface antigens (e.g., receptors), selectivity for a desired tissue, e.g., muscle, can be achieved. Skeletal muscle-targeting has been investigated and a range of molecular payloads are able to be delivered. These approaches may have high selectivity for muscle tissue without many of the practical disadvantages of a large antibody or viral particle. Accordingly, in some embodiments, the muscle-targeting agent is a muscle-targeting peptide that is from 4 to 50 amino acids in length. In some embodiments, the muscle-targeting peptide is 4, 5, 6, 7, 8, 9, 10, 11, 12, 13, 14, 15, 16, 17, 18, 19, 20, 21, 22, 23, 24, 25, 26, 27, 28, 29, 30, 31, 32, 33, 34, 35, 36, 37, 38, 39, 40, 41, 42, 43, 44, 45, 46, 47, 48, 49, or 50 amino acids in length. Muscle-targeting peptides can be generated using any of several methods, such as phage display.

[0513] In some embodiments, a muscle-targeting peptide may bind to an internalizing cell surface receptor that is overexpressed or relatively highly expressed in muscle cells, e.g. a transferrin receptor, compared with certain other cells. In some embodiments, a muscle-targeting peptide may target, e.g., bind to, a transferrin receptor. In some embodiments, a peptide that targets a transferrin receptor may comprise a segment of a naturally occurring ligand, e.g., transferrin. In some embodiments, a peptide that targets a transferrin receptor is as described in U.S. Pat. No. 6,743,893, filed Nov. 30, 2000, “RECEPTOR-MEDIATED UPTAKE OF PEPTIDES THAT BIND THE HUMAN TRANSFERRIN RECEPTOR”. In some embodiments, a peptide that targets a transferrin receptor is as described in Kawamoto, M. et al, “A novel transferrin receptor-targeted hybrid peptide disintegrates cancer cell membrane to induce rapid killing of cancer cells.” BMC Cancer. 2011 Aug. 18; 11:359. In some embodiments, a peptide that targets a transferrin receptor is as described in U.S. Pat. No. 8,399,653, filed May 20, 2011, “TRANSFERRIN/TRANSFERRIN RECEPTOR-MEDIATED SIRNA DELIVERY”.

[0514] As discussed above, examples of muscle targeting peptides have been reported. For example, muscle-specific peptides were identified using phage display library presenting surface heptapeptides. As one example a peptide having the amino acid sequence ASSLNIA (SEQ ID NO: 718) bound to C2C12 murine myotubes in vitro, and bound to mouse muscle tissue in vivo. Accordingly, in some embodiments, the muscle-targeting agent comprises the amino acid sequence ASSLNIA (SEQ ID NO: 718). This peptide displayed improved specificity for binding to heart and skeletal muscle tissue after intravenous injection in mice with reduced binding to liver, kidney, and brain. Additional muscle-specific peptides have been identified using phage display. For example, a 12 amino acid peptide was identified by phage display library for muscle targeting in the context of treatment for DMD. See, Yoshida D., et al., “Targeting of salicylate to skin and muscle following topical injections in rats.” Int J Pharm 2002; 231: 177-84; the entire contents of which are hereby incorporated by reference. Here, a 12 amino acid peptide having the sequence SKTFNTHPQSTP (SEQ ID NO: 719) was identified and this muscle-targeting peptide showed improved binding to C2C12 cells relative to the ASSLNIA (SEQ ID NO: 718) peptide.

[0515] An additional method for identifying peptides selective for muscle (e.g., skeletal muscle) over other cell types includes in vitro selection, which has been described in Ghosh D., et al., “Selection of muscle-binding peptides from context-specific peptide-presenting phage libraries for adenoviral vector targeting” J Virol 2005; 79: 13667-72; the entire contents of which are incorporated herein by reference. By pre-incubating a random 12-mer peptide phage display library with a mixture of non-muscle cell types, non-specific cell binders were selected out. Following rounds of selection the 12 amino acid peptide TARGEHKEEELI (SEQ ID NO: 720) appeared most frequently. Accordingly, in some embodiments, the muscle-targeting agent comprises the amino acid sequence TARGEHKEEELI (SEQ ID NO: 720).

[0516] A muscle-targeting agent may an amino acid-containing molecule or peptide. A muscle-targeting peptide may correspond to a sequence of a protein that preferentially binds to a protein receptor found in muscle cells. In some embodiments, a muscle-targeting peptide contains a high propensity of hydrophobic amino acids, e.g. valine, such that the peptide preferentially targets muscle cells. In some embodiments, a muscle-targeting peptide has not been previously characterized or disclosed. These peptides may be conceived of, produced, synthesized, and/or (e.g., and) derivatized using any of several methodologies, e.g. phage displayed peptide libraries, one-bead one-compound peptide libraries, or positional scanning synthetic peptide combinatorial libraries. Exemplary methodologies have been characterized in the art and are incorporated by reference (Gray, B. P. and Brown, K. C. “Combinatorial Peptide Libraries: Mining for Cell-Binding Peptides” Chem Rev. 2014, 114:2, 1020-1081.; Samoylova, T. I. and Smith, B. F. “Elucidation of muscle-binding peptides by phage display screening.” Muscle Nerve, 1999, 22:4. 460-6.). In some embodiments, a muscle-targeting peptide has been previously disclosed (see, e.g. Writer M. J. et al. “Targeted gene delivery to human airway epithelial cells with synthetic vectors incorporating novel targeting peptides selected by phage display.” J. Drug Targeting. 2004; 12:185; Cal, D. “BDNF-mediated enhancement of inflammation and injury in the aging heart.” Physiol Genomics. 2006, 24:3, 191-7.; Zhang, L. “Molecular profiling of heart endothelial cells.” Circulation, 2005, 112:11, 1601-11.; McGuire, M. J. et al. “In vitro selection of a peptide with high selectivity for cardiomyocytes in vivo.” J Mol Biol. 2004, 342:1, 171-82.). Exemplary muscle-targeting peptides comprise an amino acid sequence of the following group: CQAQGQLVC (SEQ ID NO: 721), CSERSMNFC (SEQ ID NO: 722), CPKTRRVPC (SEQ ID NO: 723), WLSEAGPVVTVRALRGTGSW (SEQ ID NO: 724), ASSLNIA (SEQ ID NO: 718), CMQHSMRVC (SEQ ID NO: 725), and DDTRHWG (SEQ ID NO: 726). In some embodiments, a muscle-targeting peptide may comprise about 2-25 amino acids, about 2-20 amino acids, about 2-15 amino acids, about 2-10 amino acids, or about 2-5 amino acids. Muscle-targeting peptides may comprise naturally-occurring amino acids, e.g. cysteine, alanine, or non-naturally-occurring or modified amino acids. Non-naturally occurring amino acids include β-amino acids, homo-amino acids, proline derivatives, 3-substituted alanine derivatives, linear core amino acids, N-methyl amino acids, and others known in the art. In some embodiments, a muscle-targeting peptide may be linear; in other embodiments, a muscle-targeting peptide may be cyclic, e.g. bicyclic (see, e.g. Silvana, M. G. et al. Mol. Therapy, 2018, 26:1, 132-147.).

[0517] iii. Muscle-Targeting Receptor Ligands

[0518] A muscle-targeting agent may be a ligand, e.g. a ligand that binds to a receptor protein. A muscle-targeting ligand may be a protein, e.g. transferrin, which binds to an internalizing cell surface receptor expressed by a muscle cell. Accordingly, in some embodiments, the muscle-targeting agent is transferrin, or a derivative thereof that binds to a transferrin receptor. A muscle-targeting ligand may alternatively be a small molecule, e.g. a lipophilic small molecule that preferentially targets muscle cells relative to other cell types. Exemplary lipophilic small molecules that may target muscle cells include compounds comprising cholesterol, cholesteryl, stearic acid, palmitic acid, oleic acid, oleyl, linolene, linoleic acid, myristic acid, sterols, dihydrotestosterone, testosterone derivatives, glycerine, alkyl chains, trityl groups, and alkoxy acids.

[0519] iv. Muscle-Targeting Aptamers

[0520] A muscle-targeting agent may be an aptamer, e.g. an RNA aptamer, which preferentially targets muscle cells relative to other cell types. In some embodiments, a muscle-targeting aptamer has not been previously characterized or disclosed. These aptamers may be conceived of, produced, synthesized, and/or (e.g., and) derivatized using any of several methodologies, e.g. Systematic Evolution of Ligands by Exponential Enrichment. Exemplary methodologies have been characterized in the art and are incorporated by reference (Yan, A. C. and Levy, M. “Aptamers and aptamer targeted delivery” RNA biology, 2009, 6:3, 316-20.; Germer, K. et al. “RNA aptamers and their therapeutic and diagnostic applications.” Int. J. Biochem. Mol. Biol. 2013; 4: 27-40.). In some embodiments, a muscle-targeting aptamer has been previously disclosed (see, e.g. Phillippou, S. et al. “Selection and Identification of Skeletal-Muscle-Targeted RNA Aptamers.” Mol Ther Nucleic Acids. 2018, 10:199-214.; Thiel, W. H. et al. “Smooth Muscle Cell-targeted RNA Aptamer Inhibits Neointimal Formation.” Mol Ther. 2016, 24:4, 779-87.). Exemplary muscle-targeting aptamers include the A01B RNA aptamer and RNA Apt 14. In some embodiments, an aptamer is a nucleic acid-based aptamer, an oligonucleotide aptamer or a peptide aptamer. In some embodiments, an aptamer may be about 5-15 kDa, about 5-10 kDa, about 10-15 kDa, about 1-5 Da, about 1-3 kDa, or smaller.

[0521] v. Other Muscle-Targeting Agents

[0522] One strategy for targeting a muscle cell (e.g., a skeletal muscle cell) is to use a substrate of a muscle transporter protein, such as a transporter protein expressed on the sarcolemma. In some embodiments, the muscle-targeting agent is a substrate of an influx transporter that is specific to muscle tissue. In some embodiments, the influx transporter is specific to skeletal muscle tissue. Two main classes of transporters are expressed on the skeletal muscle sarcolemma, (1) the adenosine triphosphate (ATP) binding cassette (ABC) superfamily, which facilitate efflux from skeletal muscle tissue and (2) the solute carrier (SLC) superfamily, which can facilitate the influx of substrates into skeletal muscle. In some embodiments, the muscle-targeting agent is a substrate that binds to an ABC superfamily or an SLC superfamily of transporters. In some embodiments, the substrate that binds to the ABC or SLC superfamily of transporters is a naturally-occurring substrate. In some embodiments, the substrate that binds to the ABC or SLC superfamily of transporters is a non-naturally occurring substrate, for example, a synthetic derivative thereof that binds to the ABC or SLC superfamily of transporters.

[0523] In some embodiments, the muscle-targeting agent is a substrate of an SLC superfamily of transporters. SLC transporters are either equilibrative or use proton or sodium ion gradients created across the membrane to drive transport of substrates. Exemplary SLC transporters that have high skeletal muscle expression include, without limitation, the SATT transporter (ASCT1; SLC1A4), GLUT4 transporter (SLC2A4), GLUT7 transporter (GLUT7; SLC2A7), ATRC2 transporter (CAT-2; SLC7A2), LAT3 transporter (KIAA0245; SLC7A6), PHT1 transporter (PTR4; SLC15A4), OATP-J transporter (OATP5A1; SLC21A15), OCT3 transporter (EMT; SLC22A3), OCTN2 transporter (FLJ46769; SLC22A5), ENT transporters (ENT1; SLC29A1 and ENT2; SLC29A2), PAT2 transporter (SLC36A2), and SAT2 transporter (KIAA1382; SLC38A2). These transporters can facilitate the influx of substrates into skeletal muscle, providing opportunities for muscle targeting.

[0524] In some embodiments, the muscle-targeting agent is a substrate of an equilibrative nucleoside transporter 2 (ENT2) transporter. Relative to other transporters, ENT2 has one of the highest mRNA expressions in skeletal muscle. While human ENT2 (hENT2) is expressed in most body organs such as brain, heart, placenta, thymus, pancreas, prostate, and kidney, it is especially abundant in skeletal muscle. Human ENT2 facilitates the uptake of its substrates depending on their concentration gradient. ENT2 plays a role in maintaining nucleoside homeostasis by transporting a wide range of purine and pyrimidine nucleobases. The hENT2 transporter has a low affinity for all nucleosides (adenosine, guanosine, uridine, thymidine, and cytidine) except for inosine. Accordingly, in some embodiments, the muscle-targeting agent is an ENT2 substrate. Exemplary ENT2 substrates include, without limitation, inosine, 2′,3′-dideoxyinosine, and calofarabine. In some embodiments, any of the muscle-targeting agents provided herein are associated with a molecular payload (e.g., oligonucleotide payload). In some embodiments, the muscle-targeting agent is covalently linked to the molecular payload. In some embodiments, the muscle-targeting agent is non-covalently linked to the molecular payload.

[0525] In some embodiments, the muscle-targeting agent is a substrate of an organic cation/carnitine transporter (OCTN2), which is a sodium ion-dependent, high affinity carnitine transporter. In some embodiments, the muscle-targeting agent is carnitine, mildronate, acetylcarnitine, or any derivative thereof that binds to OCTN2. In some embodiments, the carnitine, mildronate, acetylcarnitine, or derivative thereof is covalently linked to the molecular payload (e.g., oligonucleotide payload).

[0526] A muscle-targeting agent may be a protein that is protein that exists in at least one soluble form that targets muscle cells. In some embodiments, a muscle-targeting protein may be hemojuvelin (also known as repulsive guidance molecule C or hemochromatosis type 2 protein), a protein involved in iron overload and homeostasis. In some embodiments, hemojuvelin may be full length or a fragment, or a mutant with at least 75%, at least 80%, at least 85%, at least 90%, at least 95%, at least 98% or at least 99% sequence identity to a functional hemojuvelin protein. In some embodiments, a hemojuvelin mutant may be a soluble fragment, may lack a N-terminal signaling, and/or (e.g., and) lack a C-terminal anchoring domain. In some embodiments, hemojuvelin may be annotated under GenBank RefSeq Accession Numbers NM_001316767.1, NM_145277.4, NM_202004.3, NM_213652.3, or NM_213653.3. It should be appreciated that a hemojuvelin may be of human, non-human primate, or rodent origin.

[0527] B. Molecular Payloads

[0528] Some aspects of the disclosure provide molecular payloads, e.g., for modulating a biological outcome, e.g., the transcription of a DNA sequence, the expression of a protein, or the activity of a protein. In some embodiments, a molecular payload is linked to, or otherwise associated with a muscle-targeting agent. In some embodiments, such molecular payloads are capable of targeting to a muscle cell, e.g., via specifically binding to a nucleic acid or protein in the muscle cell following delivery to the muscle cell by an associated muscle-targeting agent. It should be appreciated that various types of muscle-targeting agents may be used in accordance with the disclosure. For example, the molecular payload may comprise, or consist of, an oligonucleotide (e.g., antisense oligonucleotide), a peptide (e.g., a peptide that binds a nucleic acid or protein associated with disease in a muscle cell), a protein (e.g., a protein that binds a nucleic acid or protein associated with disease in a muscle cell), or a small molecule (e.g., a small molecule that modulates the function of a nucleic acid or protein associated with disease in a muscle cell). In some embodiments, the molecular payload is an oligonucleotide that comprises a strand having a region of complementarity to a DMPK allele comprising a disease-associated-repeat expansion. Exemplary molecular payloads are described in further detail herein, however, it should be appreciated that the exemplary molecular payloads provided herein are not meant to be limiting.

[0529] i. Oligonucleotides

[0530] Any suitable oligonucleotide may be used as a molecular payload, as described herein. In some embodiments, the oligonucleotide may be designed to cause degradation of an mRNA (e.g., the oligonucleotide may be a gapmer, an siRNA, a ribozyme or an aptamer that causes degradation). In some embodiments, the oligonucleotide may be designed to block translation of an mRNA (e.g., the oligonucleotide may be a mixmer, an siRNA or an aptamer that blocks translation). In some embodiments, an oligonucleotide may be designed to caused degradation and block translation of an mRNA. In some embodiments, an oligonucleotide may be a guide nucleic acid (e.g., guide RNA) for directing activity of an enzyme (e.g., a gene editing enzyme). Other examples of oligonucleotides are provided herein. It should be appreciated that, in some embodiments, oligonucleotides in one format (e.g., antisense oligonucleotides) may be suitably adapted to another format (e.g., siRNA oligonucleotides) by incorporating functional sequences (e.g., antisense strand sequences) from one format to the other format.

[0531] Examples of oligonucleotides useful for targeting DMPK are provided in US Patent Application Publication 20100016215A1, published on Jan. 1, 2010, entitled Compound And Method For Treating Myotonic Dystrophy; US Patent Application Publication 20130237585A1, published Jul. 19, 2010, Modulation Of Dystrophia Myotonica-Protein Kinase (DMPK) Expression; US Patent Application Publication 20150064181A1, published on Mar. 5, 2015, entitled “Antisense Conjugates For Decreasing Expression Of Dmpk”; US Patent Application Publication 20150238627A1, published on Aug. 27, 2015, entitled “Peptide-Linked Morpholino Antisense Oligonucleotides For Treatment Of Myotonic Dystrophy”; and US Patent Application Publication 20160304877A1, published on Oct. 20, 2016, entitled “Compounds And Methods For Modulation Of Dystrophia Myotonica-Protein Kinase (Dmpk) Expression,” the contents of each of which are incorporated herein in their entireties.

[0532] Examples of oligonucleotides for promoting DMPK gene editing include US Patent Application Publication 20170088819A1, published on Mar. 3, 2017, entitled “Genetic Correction Of Myotonic Dystrophy Type 1”; and International Patent Application Publication WO18002812A1, published on Apr. 1, 2018, entitled “Materials And Methods For Treatment Of Myotonic Dystrophy Type 1 (DM1) And Other Related Disorders,” the contents of each of which are incorporated herein in their entireties.

[0533] Further examples of complexes and molecular payloads (e.g., DMPK-targeting oligonucleotides) are provided in International Patent Application Publication WO2020/028861, published on Feb. 6, 2020, entitled, “MUSCLE TARGETING COMPLEXES AND USES THEREOF FOR TREATING MYOTONIC DYSTROPHY”; and International Patent Application Publication WO2020/028857, published on Feb. 6, 2020, entitled, “MUSCLE-TARGETING COMPLEXES AND USES THEREOF”, the contents of each of which are incorporated herein by reference.

[0534] In some embodiments, oligonucleotides may have a region of complementarity to a sequence set forth as follows, which is an example human DMPK gene sequence (Gene ID 1760; NM_001081560.2):

(SEQ ID NO: 727)
AGGGGGGCTGGACCAAGGGGTGGGGAGAAGGGGAGGAGGCCTCGGCCGG
CCGCAGAGAGAAGTGGCCAGAGAGGCCCAGGGGACAGCCAGGGACAGGC
AGACATGCAGCCAGGGCTCCAGGGCCTGGACAGGGGCTGCCAGGCCCTG
TGACAGGAGGACCCCGAGCCCCCGGCCCGGGGAGGGGCCATGGTGCTGC
CTGTCCAACATGTCAGCCGAGGTGCGGCTGAGGCGGCTCCAGCAGCTGG
TGTTGGACCCGGGCTTCCTGGGGCTGGAGCCCCTGCTCGACCTTCTCCT
GGGCGTCCACCAGGAGCTGGGCGCCTCCGAACTGGCCCAGGACAAGTAC
GTGGCCGACTTCTTGCAGTGGGCGGAGCCCATCGTGGTGAGGCTTAAGG
AGGTCCGACTGCAGAGGGACGACTTCGAGATTCTGAAGGTGATCGGACG
CGGGGCGTTCAGCGAGGTAGCGGTAGTGAAGATGAAGCAGACGGGCCAG
GTGTATGCCATGAAGATCATGAACAAGTGGGACATGCTGAAGAGGGGCG
AGGTGTCGTGCTTCCGTGAGGAGAGGGACGTGTTGGTGAATGGGGACCG
GCGGTGGATCACGCAGCTGCACTTCGCCTTCCAGGATGAGAACTACCTG
TACCTGGTCATGGAGTATTACGTGGGCGGGGACCTGCTGACACTGCTGA
GCAAGTTTGGGGAGCGGATTCCGGCCGAGATGGCGCGCTTCTACCTGGC
GGAGATTGTCATGGCCATAGACTCGGTGCACCGGCTTGGCTACGTGCAC
AGGGACATCAAACCCGACAACATCCTGCTGGACCGCTGTGGCCACATCC
GCCTGGCCGACTTCGGCTCTTGCCTCAAGCTGCGGGCAGATGGAACGGT
GCGGTCGCTGGTGGCTGTGGGCACCCCAGACTACCTGTCCCCCGAGATC
CTGCAGGCTGTGGGCGGTGGGCCTGGGACAGGCAGCTACGGGCCCGAGT
GTGACTGGTGGGCGCTGGGTGTATTCGCCTATGAAATGTTCTATGGGCA
GACGCCCTTCTACGCGGATTCCACGGCGGAGACCTATGGCAAGATCGTC
CACTACAAGGAGCACCTCTCTCTGCCGCTGGTGGACGAAGGGGTCCCTG
AGGAGGCTCGAGACTTCATTCAGCGGTTGCTGTGTCCCCCGGAGACACG
GCTGGGCCGGGGTGGAGCAGGCGACTTCCGGACACATCCCTTCTTCTTT
GGCCTCGACTGGGATGGTCTCCGGGACAGCGTGCCCCCCTTTACACCGG
ATTTCGAAGGTGCCACCGACACATGCAACTTCGACTTGGTGGAGGACGG
GCTCACTGCCATGGAGACACTGTCGGACATTCGGGAAGGTGCGCCGCTA
GGGGTCCACCTGCCTTTTGTGGGCTACTCCTACTCCTGCATGGCCCTCA
GGGACAGTGAGGTCCCAGGCCCCACACCCATGGAACTGGAGGCCGAGCA
GCTGCTTGAGCCACACGTGCAAGCGCCCAGCCTGGAGCCCTCGGTGTCC
CCACAGGATGAAACAGCTGAAGTGGCAGTTCCAGCGGCTGTCCCTGCGG
CAGAGGCTGAGGCCGAGGTGACGCTGCGGGAGCTCCAGGAAGCCCTGGA
GGAGGAGGTGCTCACCCGGCAGAGCCTGAGCCGGGAGATGGAGGCCATC
CGCACGGACAACCAGAACTTCGCCAGTCAACTACGCGAGGCAGAGGCTC
GGAACCGGGACCTAGAGGCACACGTCCGGCAGTTGCAGGAGCGGATGGA
GTTGCTGCAGGCAGAGGGAGCCACAGCTGTCACGGGGGTCCCCAGTCCC
CGGGCCACGGATCCACCTTCCCATCTAGATGGCCCCCCGGCCGTGGCTG
TGGGCCAGTGCCCGCTGGTGGGGCCAGGCCCCATGCACCGCCGCCACCT
GCTGCTCCCTGCCAGGGTCCCTAGGCCTGGCCTATCGGAGGCGCTTTCC
CTGCTCCTGTTCGCCGTTGTTCTGTCTCGTGCCGCCGCCCTGGGCTGCA
TTGGGTTGGTGGCCCACGCCGGCCAACTCACCGCAGTCTGGCGCCGCCC
AGGAGCCGCCCGCGCTCCCTGAACCCTAGAACTGTCTTCGACTCCGGGG
CCCCGTTGGAAGACTGAGTGCCCGGGGCACGGCACAGAAGCCGCGCCCA
CCGCCTGCCAGTTCACAACCGCTCCGAGCGTGGGTCTCCGCCCAGCTCC
AGTCCTGTGATCCGGGCCCGCCCCCTAGCGGCCGGGGAGGGAGGGGCCG
GGTCCGCGGCCGGCGAACGGGGCTCGAAGGGTCCTTGTAGCCGGGAATG
CTGCTGCTGCTGCTGCTGCTGCTGCTGCTGCTGCTGCTGCTGCTGCTGC
TGCTGCTGCTGGGGGGATCACAGACCATTTCTTTCTTTCGGCCAGGCTG
AGGCCCTGACGTGGATGGGCAAACTGCAGGCCTGGGAAGGCAGCAAGCC
GGGCCGTCCGTGTTCCATCCTCCACGCACCCCCACCTATCGTTGGTTCG
CAAAGTGCAAAGCTTTCTTGTGCATGACGCCCTGCTCTGGGGAGCGTCT
GGCGCGATCTCTGCCTGCTTACTCGGGAAATTTGCTTTTGCCAAACCCG
CTTTTTCGGGGATCCCGCGCCCCCCTCCTCACTTGCGCTGCTCTCGGAG
CCCCAGCCGGCTCCGCCCGCTTCGGCGGTTTGGATATTTATTGACCTCG
TCCTCCGACTCGCTGACAGGCTACAGGACCCCCAACAACCCCAATCCAC
GTTTTGGATGCACTGAGACCCCGACATTCCTCGGTATTTATTGTCTGTC
CCCACCTAGGACCCCCACCCCCGACCCTCGCGAATAAAAGGCCCTCCAT
CTGCCCAAAGCTCTGGA.

[0535] In some embodiments, oligonucleotides may have a region of complementarity to a sequence set forth as follows, which is an example mouse DMPK gene sequence (Gene ID 13400; NM_001190490.1).

(SEQ ID NO: 728)
GAACTGGCCAGAGAGACCCAAGGGATAGTCAGGGACGGGCAGACATGCA
GCTAGGGTTCTGGGGCCTGGACAGGGGCAGCCAGGCCCTGTGACGGGAA
GACCCCGAGCTCCGGCCCGGGGAGGGGCCATGGTGTTGCCTGCCCAACA
TGTCAGCCGAAGTGCGGCTGAGGCAGCTCCAGCAGCTGGTGCTGGACCC
AGGCTTCCTGGGACTGGAGCCCCTGCTCGACCTTCTCCTGGGCGTCCAC
CAGGAGCTGGGTGCCTCTCACCTAGCCCAGGACAAGTATGTGGCCGACT
TCTTGCAGTGGGTGGAGCCCATTGCAGCAAGGCTTAAGGAGGTCCGACT
GCAGAGGGATGATTTTGAGATTTTGAAGGTGATCGGGCGTGGGGCGTTC
AGCGAGGTAGCGGTGGTGAAGATGAAACAGACGGGCCAAGTGTATGCCA
TGAAGATTATGAATAAGTGGGACATGCTGAAGAGAGGCGAGGTGTCGTG
CTTCCGGGAAGAAAGGGATGTATTAGTGAAAGGGGACCGGCGCTGGATC
ACACAGCTGCACTTTGCCTTCCAGGATGAGAACTACCTGTACCTGGTCA
TGGAATACTACGTGGGCGGGGACCTGCTAACGCTGCTGAGCAAGTTTGG
GGAGCGGATCCCCGCCGAGATGGCTCGCTTCTACCTGGCCGAGATTGTC
ATGGCCATAGACTCCGTGCACCGGCTGGGCTACGTGCACAGGGACATCA
AACCAGATAACATTCTGCTGGACCGATGTGGGCACATTCGCCTGGCAGA
CTTCGGCTCCTGCCTCAAACTGCAGCCTGATGGAATGGTGAGGTCGCTG
GTGGCTGTGGGCACCCCGGACTACCTGTCTCCTGAGATTCTGCAGGCCG
TTGGTGGAGGGCCTGGGGCAGGCAGCTACGGGCCAGAGTGTGACTGGTG
GGCACTGGGCGTGTTCGCCTATGAGATGTTCTATGGGCAGACCCCCTTC
TACGCGGACTCCACAGCCGAGACATATGCCAAGATTGTGCACTACAGGG
AACACTTGTCGCTGCCGCTGGCAGACACAGTTGTCCCCGAGGAAGCTCA
GGACCTCATTCGTGGGCTGCTGTGTCCTGCTGAGATAAGGCTAGGTCGA
GGTGGGGCAGACTTCGAGGGTGCCACGGACACATGCAATTTCGATGTGG
TGGAGGACCGGCTCACTGCCATGGTGAGCGGGGGCGGGGAGACGCTGTC
AGACATGCAGGAAGACATGCCCCTTGGGGTGCGCCTGCCCTTCGTGGGC
TACTCCTACTGCTGCATGGCCTTCAGAGACAATCAGGTCCCGGACCCCA
CCCCTATGGAACTAGAGGCCCTGCAGTTGCCTGTGTCAGACTTGCAAGG
GCTTGACTTGCAGCCCCCAGTGTCCCCACCGGATCAAGTGGCTGAAGAG
GCTGACCTAGTGGCTGTCCCTGCCCCTGTGGCTGAGGCAGAGACCACGG
TAACGCTGCAGCAGCTCCAGGAAGCCCTGGAAGAAGAGGTTCTCACCCG
GCAGAGCCTGAGCCGCGAGCTGGAGGCCATCCGGACCGCCAACCAGAAC
TTCTCCAGCCAACTACAGGAGGCCGAGGTCCGAAACCGAGACCTGGAGG
CGCATGTTCGGCAGCTACAGGAACGGATGGAGATGCTGCAGGCCCCAGG
AGCCGCAGCCATCACGGGGGTCCCCAGTCCCCGGGCCACGGATCCACCT
TCCCATCTAGATGGCCCCCCGGCCGTGGCTGTGGGCCAGTGCCCGCTGG
TGGGGCCAGGCCCCATGCACCGCCGTCACCTGCTGCTCCCTGCCAGGAT
CCCTAGGCCTGGCCTATCCGAGGCGCGTTGCCTGCTCCTGTTCGCCGCT
GCTCTGGCTGCTGCCGCCACACTGGGCTGCACTGGGTTGGTGGCCTATA
CCGGCGGTCTCACCCCAGTCTGGTGTTTCCCGGGAGCCACCTTCGCCCC
CTGAACCCTAAGACTCCAAGCCATCTTTCATTTAGGCCTCCTAGGAAGG
TCGAGCGACCAGGGAGCGACCCAAAGCGTCTCTGTGCCCATCGCGCCCC
CCCCCCCCCCCCACCGCTCCGCTCCACACTTCTGTGAGCCTGGGTCCCC
ACCCAGCTCCGCTCCTGTGATCCAGGCCTGCCACCTGGCGGCCGGGGAG
GGAGGAACAGGGCTCGTGCCCAGCACCCCTGGTTCCTGCAGAGCTGGTA
GCCACCGCTGCTGCAGCAGCTGGGCATTCGCCGACCTTGCTTTACTCAG
CCCCGACGTGGATGGGCAAACTGCTCAGCTCATCCGATTTCACTTTTTC
ACTCTCCCAGCCATCAGTTACAAGCCATAAGCATGAGCCCCCTATTTCC
AGGGACATCCCATTCCCATAGTGATGGATCAGCAAGACCTCTGCCAGCA
CACACGGAGTCTTTGGCTTCGGACAGCCTCACTCCTGGGGGTTGCTGCA
ACTCCTTCCCCGTGTACACGTCTGCACTCTAACAACGGAGCCACAGCTG
CACTCCCCCCTCCCCCAAAGCAGTGTGGGTATTTATTGATCTTGTTATC
TGACTCACTGACAGACTCCGGGACCCACGTTTTAGATGCATTGAGACTC
GACATTCCTCGGTATTTATTGTCTGTCCCCACCTACGACCTCCACTCCC
GACCCTTGCGAATAAAATACTTCTGGTCTGCCCTAAA

In some embodiments, an oligonucleotide may have a region of complementarity to DMPK gene sequences of multiple species, e.g., selected from human, mouse and non-human species.

[0536] In some embodiments, the oligonucleotide may have region of complementarity to a mutant form of DMPK, for example, a mutant form as reported in Botta A. et al. “The CTG repeat expansion size correlates with the splicing defects observed in muscles from myotonic dystrophy type 1 patients.” J Med Genet. 2008 October; 45(10):639-46.; and Machuca-Tzili L. et al. “Clinical and molecular aspects of the myotonic dystrophies: a review.” Muscle Nerve. 2005 July; 32(1):1-18.; the contents of each of which are incorporated herein by reference in their entireties.

[0537] In some embodiments, the oligonucleotide may target lncRNA or mRNA, e.g., for degradation. In some embodiments, the oligonucleotide may target, e.g., for degradation, a nucleic acid encoding a protein involved in a mismatch repair pathway, e.g., MSH2, MutLalpha, MutSbeta, MutLalpha. Non-limiting examples of proteins involved in mismatch repair pathways, for which mRNAs encoding such proteins may be targeted by oligonucleotides described herein, are described in Iyer, R. R. et al., “DNA triplet repeat expansion and mismatch repair” Annu Rev Biochem. 2015; 84:199-226.; and Schmidt M. H. and Pearson C. E., “Disease-associated repeat instability and mismatch repair” DNA Repair (Amst). 2016 February; 38:117-26.

[0538] In some embodiments, an oligonucleotide provided herein is an antisense oligonucleotide targeting DMPK. In some embodiments, the oligonucleotide targeting is any one of the antisense oligonucleotides (e.g., a Gapmer) targeting DMPK as described in US Patent Application Publication US20160304877A1, published on Oct. 20, 2016, entitled “Compounds And Methods For Modulation Of Dystrophia Myotonica-Protein Kinase (DMPK) Expression,” incorporated herein by reference). In some embodiments, the DMPK targeting oligonucleotide targets a region of the DMPK gene sequence as set forth in Genbank accession No. NM_001081560.2 (SEQ ID NO: 727) or as set forth in Genbank accession No. NG_009784.1.

[0539] In some embodiments, the DMPK targeting oligonucleotide comprises a nucleotide sequence comprising a region complementary to a target region that is at least 10 continuous nucleotides (e.g., at least 10, at least 12, at least 14, at least 16, or more continuous nucleotides) in SEQ ID NO: 727.

[0540] In some embodiments, the DMPK targeting oligonucleotide comprise a gapmer motif. “Gapmer” means a chimeric antisense compound in which an internal region having a plurality of nucleotides that support RNase H cleavage is positioned between external regions having one or more nucleotides, wherein the nucleotides comprising the internal region are chemically distinct from the nucleotide or nucleotides comprising the external regions. The internal region can be referred to as a “gap segment” and the external regions can be referred to as “wing segments.” In some embodiments, the DMPK targeting oligonucleotide comprises one or more modified nucleotides, and/or (e.g., and) one or more modified internucleotide linkages. In some embodiments, the internucleotide linkage is a phosphorothioate linkage. In some embodiments, the oligonucleotide comprises a full phosphorothioate backbone. In some embodiments, the oligonucleotide is a DNA gapmer with cET ends (e.g., 3-10-3; cET-DNA-cET). In some embodiments, the DMPK targeting oligonucleotide comprises one or more 6′-(S)—CH₃ biocyclic nucleotides, one or more β-D-2′-deoxyribonucleotides, and/or (e.g., and) one or more 5-methylcytosine nucleotides.

[0541] In some embodiments, the DMPK targeting oligonucleotide is a gapmer having the formula 5′-X-Y-Z-3′, with X and Z as wing segments and Y as the gap segment. In some embodiments, the DMPK targeting oligonucleotide is a gapmer having a 5′-4-8-4-3′ formula. In some embodiments, the DMPK targeting oligonucleotide is a gapmer having a 5′-5-10-5-3′ formula. In some embodiments, the DMPK targeting oligonucleotide is a gapmer having a 5′-3-10-3-3′ formula. In some embodiments, the DMPK targeting oligonucleotide is a gapmer comprising one or more of 5-methylcytosine nucleotides, 2′OMe nucleotides, 2′fluoro nucleotides, LNAs, and/or (e.g., and) 2′-O-methoxyethyl (2′-MOE) nucleotides. In some embodiments, the DMPK targeting oligonucleotide is a gapmer comprising one or more modified internucleotide (e.g., a phosphorothioate linkage). In some embodiments, the DMPK targeting oligonucleotide is a gapmer comprising a full phosphorothioate backbone. In some embodiments, the DMPK targeting oligonucleotide is a gapmer comprising a mix of phosphorothioate linkages and phosphodiester linkages.

[0542] In some embodiments, the DMPK-targeting oligonucleotide is selected from the oligonucleotides listed in Table 10 and Table 16. In some embodiments, any one of the DMPK-targeting oligonucleotides can be in salt form, e.g., as sodium, potassium, or magnesium salts.

[0543] In some embodiments, the 5′ or 3′ nucleoside (e.g., terminal nucleoside) of any one of the oligonucleotides described herein (e.g., the oligonucleotides listed in Table Table 10 and Table 16) is conjugated to an amine group, optionally via a spacer. In some embodiments, the spacer comprises an aliphatic moiety. In some embodiments, the spacer comprises a polyethylene glycol moiety. In some embodiments, a phosphodiester linkage is present between the spacer and the 5′ or 3′ nucleoside of the oligonucleotide. In some embodiments, the 5′ or 3′ nucleoside (e.g., terminal nucleoside) of any of the oligonucleotides described herein (e.g., the oligonucleotides listed in Table 10 and Table 16) is conjugated to a spacer that is a substituted or unsubstituted aliphatic, substituted or unsubstituted heteroaliphatic, substituted or unsubstituted carbocyclylene, substituted or unsubstituted heterocyclylene, substituted or unsubstituted arylene, substituted or unsubstituted heteroarylene, —O—, —N(R^{A})—, —S—, —C(═O)—, —C(═O)O—, —C(═O)NR^{A}—, —NR^{A}C(═O)—, —NR^{A}C(═O)R^{A}—, —C(═O)R^{A}—, —NR^{A}C(═O)O—, —NR^{A}C(═O)N(R^{A})—, —OC(═O)—, —OC(═O)O—, —OC(═O)N(R^{A})—, —S(O)₂NR^{A}—, —NR^{A}S(O)₂—, or a combination thereof; each R^{A} is independently hydrogen or substituted or unsubstituted alkyl. In certain embodiments, the spacer is a substituted or unsubstituted alkylene, substituted or unsubstituted heterocyclylene, substituted or unsubstituted heteroarylene, —O—, —N(R^{A})—, or —C(═O)N(R^{A})₂, or a combination thereof.

[0544] In some embodiments, the 5′ or 3′ nucleoside of any one of the oligonucleotides described herein (e.g., the oligonucleotides listed in Table 10 and Table 16) is conjugated to a compound of the formula —NH₂—(CH₂)ₙ—, wherein n is an integer from 1 to 12. In some embodiments, n is 6, 7, 8, 9, 10, 11, or 12. In some embodiments, a phosphodiester linkage is present between the compound of the formula NH₂—(CH₂)ₙ— and the 5′ or 3′ nucleoside of the oligonucleotide. In some embodiments, a compound of the formula NH₂—(CH₂)₆— is conjugated to the oligonucleotide via a reaction between 6-amino-1-hexanol (NH₂—(CH₂)₆—OH) and the 5′ phosphate of the oligonucleotide.

[0545] In some embodiments, the oligonucleotide is conjugated to a targeting agent, e.g., a muscle targeting agent such as an anti-TfR antibody, e.g., via the amine group.

[0546] a. Oligonucleotide Size/Sequence

[0547] Oligonucleotides may be of a variety of different lengths, e.g., depending on the format. In some embodiments, an oligonucleotide is 7, 8, 9, 10, 11, 12, 13, 14, 15, 16, 17, 18, 19, 20, 21, 22, 23, 24, 25, 26, 27, 28, 29, 30, 35, 40, 45, 50, 75, or more nucleotides in length. In some embodiments, the oligonucleotide is 8 to 50 nucleotides in length, 8 to 40 nucleotides in length, 8 to 30 nucleotides in length, 10 to 15 nucleotides in length, 10 to 20 nucleotides in length, 15 to 25 nucleotides in length, 21 to 23 nucleotides in lengths, etc.

[0548] In some embodiments, a complementary nucleic acid sequence of an oligonucleotide for purposes of the present disclosure is specifically hybridizable or specific for the target nucleic acid when binding of the sequence to the target molecule (e.g., mRNA) interferes with the normal function of the target (e.g., mRNA) to cause a loss of activity (e.g., inhibiting translation) or expression (e.g., degrading a target mRNA) and there is a sufficient degree of complementarity to avoid non-specific binding of the sequence to non-target sequences under conditions in which avoidance of non-specific binding is desired, e.g., under physiological conditions in the case of in vivo assays or therapeutic treatment, and in the case of in vitro assays, under conditions in which the assays are performed under suitable conditions of stringency. Thus, in some embodiments, an oligonucleotide may be at least 80%, at least 85%, at least 90%, at least 91%, at least 92%, at least 93%, at least 94%, at least 95%, at least 96%, at least 97%, at least 98%, at least 99% or 100% complementary to the consecutive nucleotides of an target nucleic acid. In some embodiments a complementary nucleotide sequence need not be 100% complementary to that of its target to be specifically hybridizable or specific for a target nucleic acid.

[0549] In some embodiments, an oligonucleotide comprises region of complementarity to a target nucleic acid that is in the range of 8 to 15, 8 to 30, 8 to 40, or 10 to 50, or 5 to 50, or 5 to 40 nucleotides in length. In some embodiments, a region of complementarity of an oligonucleotide to a target nucleic acid is 5, 6, 7, 8, 9, 10, 11, 12, 13, 14, 15, 16, 17, 18, 19, 20, 21, 22, 23, 24, 25, 26, 27, 28, 29, 30, 31, 32, 33, 34, 35, 36, 37, 38, 39, 40, 41, 42, 43, 44, 45, 46, 47, 48, 49, or 50 nucleotides in length. In some embodiments, the region of complementarity is complementary with at least 8 consecutive nucleotides of a target nucleic acid. In some embodiments, an oligonucleotide may contain 1, 2 or 3 base mismatches compared to the portion of the consecutive nucleotides of target nucleic acid. In some embodiments the oligonucleotide may have up to 3 mismatches over 15 bases, or up to 2 mismatches over 10 bases.

[0550] In some embodiments, an oligonucleotide comprises at least 10, 11, 12, 13, 14, 15, 16, 17, 18, 19, or 20 consecutive nucleotides of a sequence comprising any one of SEQ ID NO: 246-481 and 778-795. In some embodiments, an oligonucleotide comprises a sequence comprising any one of SEQ ID NO: 246-481 and 778-795. In some embodiments, an oligonucleotide comprises a sequence that shares at least 70%, 75%, 80%, 85%, 90%, 95%, or 97% sequence identity with at least 12 or at least 15 consecutive nucleotides of any one of SEQ ID NO: 246-481 and 778-795.

[0551] In some embodiments, an oligonucleotide comprises a sequence that targets a DMPK sequence comprising any one of SEQ ID NO: 482-717. In some embodiments, an oligonucleotide comprises at least 10, 11, 12, 13, 14, 15, 16, 17, 18, 19, or 20 nucleotides (e.g., consecutive nucleotides) that are complementary to a DMPK sequence comprising any one of SEQ ID NO: 482-717. In some embodiments, an oligonucleotide comprises a sequence that is at least 70%, 75%, 80%, 85%, 90%, 95%, or 97% complementary with at least 12 or at least 15 consecutive nucleotides of any one of SEQ ID NO: 482-717.

[0552] In some embodiments, an oligonucleotide comprises at least 10, 11, 12, 13, 14, 15, 16, 17, 18, 19, or 20 consecutive nucleotides of a sequence comprising any one of SEQ ID NOs: 796-2328. In some embodiments, an oligonucleotide comprises a sequence comprising any one of SEQ ID NOs: 796-2328. In some embodiments, an oligonucleotide comprises a sequence that shares at least 70%, 75%, 80%, 85%, 90%, 95%, or 97% sequence identity with at least 12 or at least 15 consecutive nucleotides of any one of SEQ ID NO: 796-2328.

[0553] In some embodiments, an oligonucleotide comprises a sequence that targets a DMPK sequence comprising any one of SEQ ID NO: 2329-3861. In some embodiments, an oligonucleotide comprises at least 10, 11, 12, 13, 14, 15, 16, 17, 18, 19, or 20 nucleotides (e.g., consecutive nucleotides) that are complementary to a DMPK sequence comprising any one of SEQ ID NO: 2329-3861. In some embodiments, an oligonucleotide comprises a sequence that is at least 70%, 75%, 80%, 85%, 90%, 95%, or 97% complementary with at least 12 or at least 15 consecutive nucleotides of any one of SEQ ID NO: 2329-3861.

[0554] In some embodiments, the oligonucleotide comprises a region of complementarity to a target sequence as set forth in any one of SEQ ID NO: 482-717 and 2329-3861. In some embodiments, the region of complementarity is at least 8, at least 9, at least 10, at least 11, at least 12, at least 13, at least 14, at least 15, at least 16, at least 17, at least 19 or at least 20 nucleotides in length. In some embodiments, the region of complementarity is 8, 9, 10, 11, 12, 13, 14, 15, 16, 17, 18, 19, or 20 nucleotides in length. In some embodiments, the region of complementarity is in the range of 8 to 20, 10 to 20 or 15 to 20 nucleotides in length. In some embodiments, the region of complementarity is fully complementarity with all or a portion of its target sequence. In some embodiments, the region of complementarity includes 1, 2, 3 or more mismatches.

[0555] In some embodiments, the oligonucleotide is complementary (e.g., at least 85% at least 90%, at least 95%, or 100%) to a target sequence of any one of the oligonucleotides provided herein (e.g., the oligonucleotides listed in Table 10 and Table 16). In some embodiments, such target sequence is 100% complementary to the oligonucleotide listed in Table 10 and Table 16.

[0556] In some embodiments, one or more of the thymine bases (T's) in any one of the oligonucleotides provided herein (e.g., the oligonucleotides listed in Table 10 and Table 16) may optionally be uracil bases (U's), and/or one or more of the the U's may optionally be T's.

[0557] b. Oligonucleotide Modifications:

[0558] The oligonucleotides described herein may be modified, e.g., comprise a modified sugar moiety, a modified internucleoside linkage, a modified nucleotide and/or (e.g., and) combinations thereof. In addition, in some embodiments, oligonucleotides may exhibit one or more of the following properties: do not mediate alternative splicing; are not immune stimulatory; are nuclease resistant; have improved cell uptake compared to unmodified oligonucleotides; are not toxic to cells or mammals; have improved endosomal exit internally in a cell; minimizes TLR stimulation; or avoid pattern recognition receptors. Any of the modified chemistries or formats of oligonucleotides described herein can be combined with each other. For example, one, two, three, four, five, or more different types of modifications can be included within the same oligonucleotide.

[0559] In some embodiments, certain nucleotide modifications may be used that make an oligonucleotide into which they are incorporated more resistant to nuclease digestion than the native oligodeoxynucleotide or oligoribonucleotide molecules; these modified oligonucleotides survive intact for a longer time than unmodified oligonucleotides. Specific examples of modified oligonucleotides include those comprising modified backbones, for example, modified internucleoside linkages such as phosphorothioates, phosphotriesters, methyl phosphonates, short chain alkyl or cycloalkyl intersugar linkages or short chain heteroatomic or heterocyclic intersugar linkages. Accordingly, oligonucleotides of the disclosure can be stabilized against nucleolytic degradation such as by the incorporation of a modification, e.g., a nucleotide modification.

[0560] In some embodiments, an oligonucleotide may be of up to 50 or up to 100 nucleotides in length in which 2 to 10, 2 to 15, 2 to 16, 2 to 17, 2 to 18, 2 to 19, 2 to 20, 2 to 25, 2 to 30, 2 to 40, 2 to 45, or more nucleotides of the oligonucleotide are modified nucleotides. The oligonucleotide may be of 8 to 30 nucleotides in length in which 2 to 10, 2 to 15, 2 to 16, 2 to 17, 2 to 18, 2 to 19, 2 to 20, 2 to 25, 2 to 30 nucleotides of the oligonucleotide are modified nucleotides. The oligonucleotide may be of 8 to 15 nucleotides in length in which 2 to 4, 2 to 5, 2 to 6, 2 to 7, 2 to 8, 2 to 9, 2 to 10, 2 to 11, 2 to 12, 2 to 13, 2 to 14 nucleotides of the oligonucleotide are modified nucleotides. Optionally, the oligonucleotides may have every nucleotide except 1, 2, 3, 4, 5, 6, 7, 8, 9, or 10 nucleotides modified. Oligonucleotide modifications are described further herein.

[0561] c. Modified Nucleosides

[0562] In some embodiments, the oligonucleotide described herein comprises at least one nucleoside modified at the 2′ position of the sugar. In some embodiments, an oligonucleotide comprises at least one 2′-modified nucleoside. In some embodiments, all of the nucleosides in the oligonucleotide are 2′-modified nucleosides.

[0563] In some embodiments, the oligonucleotide described herein comprises one or more non-bicyclic 2′-modified nucleosides, e.g., 2′-deoxy, 2′-fluoro (2′-F), 2′-O-methyl (2′-O-Me), 2′-O-methoxyethyl (2′-MOE), 2′-O-aminopropyl (2′-O-AP), 2′-O-dimethylaminoethyl (2′-O-DMAOE), 2′-O-dimethylaminopropyl (2′-O-DMAP), 2′-O-dimethylaminoethyloxyethyl (2′-O-DMAEOE), or 2′-O—N-methylacetamido (2′-O-NMA) modified nucleoside.

[0564] In some embodiments, the oligonucleotide described herein comprises one or more 2′-4′ bicyclic nucleosides in which the ribose ring comprises a bridge moiety connecting two atoms in the ring, e.g., connecting the 2′-O atom to the 4′-C atom via a methylene (LNA) bridge, an ethylene (ENA) bridge, or a (S)-constrained ethyl (cEt) bridge. Examples of LNAs are described in International Patent Application Publication WO/2008/043753, published on Apr. 17, 2008, and entitled “RNA Antagonist Compounds For The Modulation Of PCSK9”, the contents of which are incorporated herein by reference in its entirety. Examples of ENAs are provided in International Patent Publication No. WO 2005/042777, published on May 12, 2005, and entitled “APP/ENA Antisense”; Morita et al., Nucleic Acid Res., Suppl 1:241-242, 2001; Surono et al., Hum. Gene Ther., 15:749-757, 2004; Koizumi, Curr. Opin. Mol. Ther., 8:144-149, 2006 and Horie et al., Nucleic Acids Symp. Ser (Oxf), 49:171-172, 2005; the disclosures of which are incorporated herein by reference in their entireties. Examples of cEt are provided in U.S. Pat. Nos. 7,101,993; 7,399,845 and 7,569,686, each of which is herein incorporated by reference in its entirety.

[0565] In some embodiments, the oligonucleotide comprises a modified nucleoside disclosed in one of the following United States Patent or Patent Application Publications: U.S. Pat. No. 7,399,845, issued on Jul. 15, 2008, and entitled “6-Modified Bicyclic Nucleic Acid Analogs”; U.S. Pat. No. 7,741,457, issued on Jun. 22, 2010, and entitled “6-Modified Bicyclic Nucleic Acid Analogs”; U.S. Pat. No. 8,022,193, issued on Sep. 20, 2011, and entitled “6-Modified Bicyclic Nucleic Acid Analogs”; U.S. Pat. No. 7,569,686, issued on Aug. 4, 2009, and entitled “Compounds And Methods For Synthesis Of Bicyclic Nucleic Acid Analogs”; U.S. Pat. No. 7,335,765, issued on Feb. 26, 2008, and entitled “Novel Nucleoside And Oligonucleotide Analogues”; U.S. Pat. No. 7,314,923, issued on Jan. 1, 2008, and entitled “Novel Nucleoside And Oligonucleotide Analogues”; U.S. Pat. No. 7,816,333, issued on Oct. 19, 2010, and entitled “Oligonucleotide Analogues And Methods Utilizing The Same” and US Publication Number 2011/0009471 now U.S. Pat. No. 8,957,201, issued on Feb. 17, 2015, and entitled “Oligonucleotide Analogues And Methods Utilizing The Same”, the entire contents of each of which are incorporated herein by reference for all purposes.

[0566] In some embodiments, the oligonucleotide comprises at least one modified nucleoside that results in an increase in Tm of the oligonucleotide in a range of 1° C., 2° C., 3° C., 4° C., or 5° C. compared with an oligonucleotide that does not have the at least one modified nucleoside. The oligonucleotide may have a plurality of modified nucleosides that result in a total increase in Tm of the oligonucleotide in a range of 2° C., 3° C., 4° C., 5° C., 6° C., 7° C., 8° C., 9° C., 10° C., 15° C., 20° C., 25° C., 30° C., 35° C., 40° C., 45° C. or more compared with an oligonucleotide that does not have the modified nucleoside.

[0567] The oligonucleotide may comprise a mix of nucleosides of different kinds. For example, an oligonucleotide may comprise a mix of 2′-deoxyribonucleosides or ribonucleosides and 2′-fluoro modified nucleosides. An oligonucleotide may comprise a mix of deoxyribonucleosides or ribonucleosides and 2′-O-Me modified nucleosides. An oligonucleotide may comprise a mix of 2′-fluoro modified nucleosides and 2′-O-Me modified nucleosides. An oligonucleotide may comprise a mix of 2′-4′ bicyclic nucleosides and 2′-MOE, 2′-fluoro, or 2′-O-Me modified nucleosides. An oligonucleotide may comprise a mix of non-bicyclic 2′-modified nucleosides (e.g., 2′-MOE, 2′-fluoro, or 2′-O-Me) and 2′-4′ bicyclic nucleosides (e.g., LNA, ENA, cEt).

[0568] The oligonucleotide may comprise alternating nucleosides of different kinds. For example, an oligonucleotide may comprise alternating 2′-deoxyribonucleosides or ribonucleosides and 2′-fluoro modified nucleosides. An oligonucleotide may comprise alternating deoxyribonucleosides or ribonucleosides and 2′-O-Me modified nucleosides. An oligonucleotide may comprise alternating 2′-fluoro modified nucleosides and 2′-O-Me modified nucleosides. An oligonucleotide may comprise alternating 2′-4′ bicyclic nucleosides and 2′-MOE, 2′-fluoro, or 2′-O-Me modified nucleosides. An oligonucleotide may comprise alternating non-bicyclic 2′-modified nucleosides (e.g., 2′-MOE, 2′-fluoro, or 2′-O-Me) and 2′-4′ bicyclic nucleosides (e.g., LNA, ENA, cEt).

[0569] In some embodiments, an oligonucleotide described herein comprises a 5′-vinylphosphonate modification, one or more abasic residues, and/or one or more inverted abasic residues.

[0570] d. Internucleoside Linkages/Backbones

[0571] In some embodiments, oligonucleotide may contain a phosphorothioate or other modified internucleoside linkage. In some embodiments, the oligonucleotide comprises phosphorothioate internucleoside linkages. In some embodiments, the oligonucleotide comprises phosphorothioate internucleoside linkages between at least two nucleotides. In some embodiments, the oligonucleotide comprises phosphorothioate internucleoside linkages between all nucleotides. For example, in some embodiments, oligonucleotides comprise modified internucleoside linkages at the first, second, and/or (e.g., and) third internucleoside linkage at the 5′ or 3′ end of the nucleotide sequence.

[0572] Phosphorus-containing linkages that may be used include, but are not limited to, phosphorothioates, chiral phosphorothioates, phosphorodithioates, phosphotriesters, aminoalkylphosphotriesters, methyl and other alkyl phosphonates comprising 3′alkylene phosphonates and chiral phosphonates, phosphinates, phosphoramidates comprising 3′-amino phosphoramidate and aminoalkylphosphoramidates, thionophosphoramidates, thionoalkylphosphonates, thionoalkylphosphotriesters, and boranophosphates having normal 3′-5′ linkages, 2′-5′ linked analogs of these, and those having inverted polarity wherein the adjacent pairs of nucleoside units are linked 3′-5′ to 5′-3′ or 2′-5′ to 5′-2′; see U.S. Pat. Nos. 3,687,808; 4,469,863; 4,476,301; 5,023,243; 5,177,196; 5,188,897; 5,264,423; 5,276,019; 5,278,302; 5,286,717; 5,321,131; 5,399,676; 5,405,939; 5,453,496; 5,455, 233; 5,466,677; 5,476,925; 5,519,126; 5,536,821; 5,541,306; 5,550,111; 5,563, 253; 5,571,799; 5,587,361; and 5,625,050.

[0573] In some embodiments, oligonucleotides may have heteroatom backbones, such as methylene(methylimino) or MMI backbones; amide backbones (see De Mesmaeker et al. Ace. Chem. Res. 1995, 28:366-374); morpholino backbones (see Summerton and Weller, U.S. Pat. No. 5,034,506); or peptide nucleic acid (PNA) backbones (wherein the phosphodiester backbone of the oligonucleotide is replaced with a polyamide backbone, the nucleotides being bound directly or indirectly to the aza nitrogen atoms of the polyamide backbone, see Nielsen et al., Science 1991, 254, 1497).

[0574] e. Stereospecific Oligonucleotides

[0575] In some embodiments, internucleotidic phosphorus atoms of oligonucleotides are chiral, and the properties of the oligonucleotides by adjusted based on the configuration of the chiral phosphorus atoms. In some embodiments, appropriate methods may be used to synthesize P-chiral oligonucleotide analogs in a stereocontrolled manner (e.g., as described in Oka N, Wada T, Stereocontrolled synthesis of oligonucleotide analogs containing chiral internucleotidic phosphorus atoms. Chem Soc Rev. 2011 December; 40(12):5829-43.) In some embodiments, phosphorothioate containing oligonucleotides comprise nucleoside units that are joined together by either substantially all Sp or substantially all Rp phosphorothioate intersugar linkages are provided. In some embodiments, such phosphorothioate oligonucleotides having substantially chirally pure intersugar linkages are prepared by enzymatic or chemical synthesis, as described, for example, in U.S. Pat. No. 5,587,261, issued on Dec. 12, 1996, the contents of which are incorporated herein by reference in their entirety. In some embodiments, chirally controlled oligonucleotides provide selective cleavage patterns of a target nucleic acid. For example, in some embodiments, a chirally controlled oligonucleotide provides single site cleavage within a complementary sequence of a nucleic acid, as described, for example, in US Patent Application Publication 20170037399 Al, published on Feb. 2, 2017, entitled “CHIRAL DESIGN”, the contents of which are incorporated herein by reference in their entirety.

[0576] f. Morpholinos

[0577] In some embodiments, the oligonucleotide may be a morpholino-based compounds. Morpholino-based oligomeric compounds are described in Dwaine A. Braasch and David R. Corey, Biochemistry, 2002, 41(14), 4503-4510); Genesis, volume 30, issue 3, 2001; Heasman, J., Dev. Biol., 2002, 243, 209-214; Nasevicius et al., Nat. Genet., 2000, 26, 216-220; Lacerra et al., Proc. Natl. Acad. Sci., 2000, 97, 9591-9596; and U.S. Pat. No. 5,034,506, issued Jul. 23, 1991. In some embodiments, the morpholino-based oligomeric compound is a phosphorodiamidate morpholino oligomer (PMO) (e.g., as described in Iverson, Curr. Opin. Mol. Ther., 3:235-238, 2001; and Wang et al., J. Gene Med., 12:354-364, 2010; the disclosures of which are incorporated herein by reference in their entireties).

[0578] g. Peptide Nucleic Acids (PNAs)

[0579] In some embodiments, both a sugar and an internucleoside linkage (the backbone) of the nucleotide units of an oligonucleotide are replaced with novel groups. In some embodiments, the base units are maintained for hybridization with an appropriate nucleic acid target compound. One such oligomeric compound, an oligonucleotide mimetic that has been shown to have excellent hybridization properties, is referred to as a peptide nucleic acid (PNA). In PNA compounds, the sugar-backbone of an oligonucleotide is replaced with an amide containing backbone, for example, an aminoethylglycine backbone. The nucleobases are retained and are bound directly or indirectly to aza nitrogen atoms of the amide portion of the backbone. Representative publication that report the preparation of PNA compounds include, but are not limited to, U.S. Pat. Nos. 5,539,082; 5,714,331; and 5,719,262, each of which is herein incorporated by reference. Further teaching of PNA compounds can be found in Nielsen et al., Science, 1991, 254, 1497-1500.

[0580] h. Gapmers

[0581] In some embodiments, an oligonucleotide described herein is a gapmer. A gapmer oligonucleotide generally has the formula 5′-X-Y-Z-3′, with X and Z as flanking regions around a gap region Y. In some embodiments, flanking region X of formula 5′-X-Y-Z-3′ is also referred to as X region, flanking sequence X, 5′ wing region X, or 5′ wing segment. In some embodiments, flanking region Z of formula 5′-X-Y-Z-3′ is also referred to as Z region, flanking sequence Z, 3′ wing region Z, or 3′ wing segment. In some embodiments, gap region Y of formula 5′-X-Y-Z-3′ is also referred to as Y region, Y segment, or gap-segment Y. In some embodiments, each nucleoside in the gap region Y is a 2′-deoxyribonucleoside, and neither the 5′ wing region X or the 3′ wing region Z contains any 2′-deoxyribonucleosides.

[0582] In some embodiments, the Y region is a contiguous stretch of nucleotides, e.g., a region of 6 or more DNA nucleotides, which are capable of recruiting an RNAse, such as RNAse H. In some embodiments, the gapmer binds to the target nucleic acid, at which point an RNAse is recruited and can then cleave the target nucleic acid. In some embodiments, the Y region is flanked both 5′ and 3′ by regions X and Z comprising high-affinity modified nucleosides, e.g., one to six high-affinity modified nucleosides. Examples of high affinity modified nucleosides include, but are not limited to, 2′-modified nucleosides (e.g., 2′-MOE, 2′O-Me, 2′-F) or 2′-4′ bicyclic nucleosides (e.g., LNA, cEt, ENA). In some embodiments, the flanking sequences X and Z may be of 1-20 nucleotides, 1-8 nucleotides, or 1-5 nucleotides in length. The flanking sequences X and Z may be of similar length or of dissimilar lengths. In some embodiments, the gap-segment Y may be a nucleotide sequence of 5-20 nucleotides, 5-15 twelve nucleotides, or 6-10 nucleotides in length.

[0583] In some embodiments, the gap region of the gapmer oligonucleotides may contain modified nucleotides known to be acceptable for efficient RNase H action in addition to DNA nucleotides, such as C4′-substituted nucleotides, acyclic nucleotides, and arabino-configured nucleotides. In some embodiments, the gap region comprises one or more unmodified internucleosides. In some embodiments, one or both flanking regions each independently comprise one or more phosphorothioate internucleoside linkages (e.g., phosphorothioate internucleoside linkages or other linkages) between at least two, at least three, at least four, at least five or more nucleotides. In some embodiments, the gap region and two flanking regions each independently comprise modified internucleoside linkages (e.g., phosphorothioate internucleoside linkages or other linkages) between at least two, at least three, at least four, at least five or more nucleotides.

[0584] A gapmer may be produced using appropriate methods. Representative U.S. patents, U.S. patent publications, and PCT publications that teach the preparation of gapmers include, but are not limited to, U.S. Pat. Nos. 5,013,830; 5,149,797; 5,220,007; 5,256,775; 5,366,878; 5,403,711; 5,491,133; 5,565,350; 5,623,065; 5,652,355; 5,652,356; 5,700,922; 5,898,031; 7,015,315; 7,101,993; 7,399,845; 7,432,250; 7,569,686; 7,683,036; 7,750,131; 8,580,756; 9,045,754; 9,428,534; 9,695,418; 10,017,764; 10,260,069; 9,428,534; 8,580,756; U.S. patent publication Nos. US20050074801, US20090221685; US20090286969, US20100197762, and US20110112170; PCT publication Nos. WO2004069991; WO2005023825; WO2008049085 and WO2009090182; and EP Patent No. EP2,149,605, each of which is herein incorporated by reference in its entirety.

[0585] In some embodiments, a gapmer is 10-40 nucleosides in length. For example, a gapmer may be 10-40, 10-35, 10-30, 10-25, 10-20, 10-15, 15-40, 15-35, 15-30, 15-25, 15-20, 20-40, 20-35, 20-30, 20-25, 25-40, 25-35, 25-30, 30-40, 30-35, or 35-40 nucleosides in length. In some embodiments, a gapmer is 10, 11, 12, 13, 14, 15, 16, 17, 18, 19, 20, 21, 22, 23, 24, 25, 26, 27, 28, 29, 30, 31, 32, 33, 34, 35, 36, 37, 38, 39, or 40 nucleosides in length.

[0586] In some embodiments, the gap region Y in a gapmer is 5-20 nucleosides in length. For example, the gap region Y may be 5-20, 5-15, 5-10, 10-20, 10-15, or 15-20 nucleosides in length. In some embodiments, the gap region Y is 5, 6, 7, 8, 9, 10, 11, 12, 13, 14, 15, 16, 17, 18, 19, or 20 nucleosides in length. In some embodiments, each nucleoside in the gap region Y is a 2′-deoxyribonucleoside. In some embodiments, all nucleosides in the gap region Y are 2′-deoxyribonucleosides. In some embodiments, one or more of the nucleosides in the gap region Y is a modified nucleoside (e.g., a 2′ modified nucleoside such as those described herein). In some embodiments, one or more cytosines in the gap region Y are optionally 5-methyl-cytosines. In some embodiments, each cytosine in the gap region Y is a 5-methyl-cytosines.

[0587] In some embodiments, the 5′wing region of a gapmer (X in the 5′-X-Y-Z-3′ formula) and the 3′wing region of a gapmer (Z in the 5′-X-Y-Z-3′ formula) are independently 1-20 nucleosides long. For example, the 5′wing region of a gapmer (X in the 5′-X-Y-Z-3′ formula) and the 3′wing region of the gapmer (Z in the 5′-X-Y-Z-3′ formula) may be independently 1-20, 1-15, 1-10, 1-7, 1-5, 1-3, 1-2, 2-5, 2-7, 3-5, 3-7, 5-20, 5-15, 5-10, 10-20, 10-15, or 15-20 nucleosides long. In some embodiments, the 5′wing region of the gapmer (X in the 5′-X-Y-Z-3′ formula) and the 3′wing region of the gapmer (Z in the 5′-X-Y-Z-3′ formula) are independently 1, 2, 3, 4, 5, 6, 7, 8, 9, 10, 11, 12, 13, 14, 15, 16, 17, 18, 19, or 20 nucleosides long. In some embodiments, the 5′wing region of the gapmer (X in the 5′-X-Y-Z-3′ formula) and the 3′wing region of the gapmer (Z in the 5′-X-Y-Z-3′ formula) are of the same length. In some embodiments, the 5′wing region of the gapmer (X in the 5′-X-Y-Z-3′ formula) and the 3′wing region of the gapmer (Z in the 5′-X-Y-Z-3′ formula) are of different lengths. In some embodiments, the 5′wing region of the gapmer (X in the 5′-X-Y-Z-3′ formula) is longer than the 3′wing region of the gapmer (Z in the 5′-X-Y-Z-3′ formula). In some embodiments, the 5′wing region of the gapmer (X in the 5′-X-Y-Z-3′ formula) is shorter than the 3′wing region of the gapmer (Z in the 5′-X-Y-Z-3′ formula).

[0588] In some embodiments, a gapmer comprises a 5′-X-Y-Z-3′ of 5-10-5, 4-12-4, 3-14-3, 2-16-2, 1-18-1, 3-10-3, 2-10-2, 1-10-1, 2-8-2, 4-6-4, 3-6-3, 2-6-2, 4-7-4, 3-7-3, 2-7-2, 4-8-4, 3-8-3, 2-8-2, 1-8-1, 2-9-2, 1-9-1, 2-10-2, 1-10-1, 1-12-1, 1-16-1, 2-15-1, 1-15-2, 1-14-3, 3-14-1, 2-14-2, 1-13-4, 4-13-1, 2-13-3, 3-13-2, 1-12-5, 5-12-1, 2-12-4, 4-12-2, 3-12-3, 1-11-6, 6-11-1, 2-11-5, 5-11-2, 3-11-4, 4-11-3, 1-17-1, 2-16-1, 1-16-2, 1-15-3, 3-15-1, 2-15-2, 1-14-4, 4-14-1, 2-14-3, 3-14-2, 1-13-5, 5-13-1, 2-13-4, 4-13-2, 3-13-3, 1-12-6, 6-12-1, 2-12-5, 5-12-2, 3-12-4, 4-12-3, 1-11-7, 7-11-1, 2-11-6, 6-11-2, 3-11-5, 5-11-3, 4-11-4, 1-18-1, 1-17-2, 2-17-1, 1-16-3, 1-16-3, 2-16-2, 1-15-4, 4-15-1, 2-15-3, 3-15-2, 1-14-5, 5-14-1, 2-14-4, 4-14-2, 3-14-3, 1-13-6, 6-13-1, 2-13-5, 5-13-2, 3-13-4, 4-13-3, 1-12-7, 7-12-1, 2-12-6, 6-12-2, 3-12-5, 5-12-3, 1-11-8, 8-11-1, 2-11-7, 7-11-2, 3-11-6, 6-11-3, 4-11-5, 5-11-4, 1-18-1, 1-17-2, 2-17-1, 1-16-3, 3-16-1, 2-16-2, 1-15-4, 4-15-1, 2-15-3, 3-15-2, 1-14-5, 2-14-4, 4-14-2, 3-14-3, 1-13-6, 6-13-1, 2-13-5, 5-13-2, 3-13-4, 4-13-3, 1-12-7, 7-12-1, 2-12-6, 6-12-2, 3-12-5, 5-12-3, 1-11-8, 8-11-1, 2-11-7, 7-11-2, 3-11-6, 6-11-3, 4-11-5, 5-11-4, 1-19-1, 1-18-2, 2-18-1, 1-17-3, 3-17-1, 2-17-2, 1-16-4, 4-16-1, 2-16-3, 3-16-2, 1-15-5, 2-15-4, 4-15-2, 3-15-3, 1-14-6, 6-14-1, 2-14-5, 5-14-2, 3-14-4, 4-14-3, 1-13-7, 7-13-1, 2-13-6, 6-13-2, 3-13-5, 5-13-3, 4-13-4, 1-12-8, 8-12-1, 2-12-7, 7-12-2, 3-12-6, 6-12-3, 4-12-5, 5-12-4, 2-11-8, 8-11-2, 3-11-7, 7-11-3, 4-11-6, 6-11-4, 5-11-5, 1-20-1, 1-19-2, 2-19-1, 1-18-3, 3-18-1, 2-18-2, 1-17-4, 4-17-1, 2-17-3, 3-17-2, 1-16-5, 2-16-4, 4-16-2, 3-16-3, 1-15-6, 6-15-1, 2-15-5, 5-15-2, 3-15-4, 4-15-3, 1-14-7, 7-14-1, 2-14-6, 6-14-2, 3-14-5, 5-14-3, 4-14-4, 1-13-8, 8-13-1, 2-13-7, 7-13-2, 3-13-6, 6-13-3, 4-13-5, 5-13-4, 2-12-8, 8-12-2, 3-12-7, 7-12-3, 4-12-6, 6-12-4, 5-12-5, 3-11-8, 8-11-3, 4-11-7, 7-11-4, 5-11-6, 6-11-5, 1-21-1, 1-20-2, 2-20-1, 1-20-3, 3-19-1, 2-19-2, 1-18-4, 4-18-1, 2-18-3, 3-18-2, 1-17-5, 2-17-4, 4-17-2, 3-17-3, 1-16-6, 6-16-1, 2-16-5, 5-16-2, 3-16-4, 4-16-3, 1-15-7, 7-15-1, 2-15-6, 6-15-2, 3-15-5, 5-15-3, 4-15-4, 1-14-8, 8-14-1, 2-14-7, 7-14-2, 3-14-6, 6-14-3, 4-14-5, 5-14-4, 2-13-8, 8-13-2, 3-13-7, 7-13-3, 4-13-6, 6-13-4, 5-13-5, 1-12-10, 10-12-1, 2-12-9, 9-12-2, 3-12-8, 8-12- 3, 4-12-7, 7-12-4, 5-12-6, 6-12-5, 4-11-8, 8-11-4, 5-11-7, 7-11-5, 6-11-6, 1-22-1, 1-21-2, 2-21-1, 1-21-3, 3-20-1, 2-20-2, 1-19-4, 4-19-1, 2-19-3, 3-19-2, 1-18-5, 2-18-4, 4-18-2, 3-18-3, 1-17-6, 6-17-1, 2-17-5, 5-17-2, 3-17-4, 4-17-3, 1-16-7, 7-16-1, 2-16-6, 6-16-2, 3-16-5, 5-16-3, 4-16-4, 1-15-8, 8-15-1, 2-15-7, 7-15-2, 3-15-6, 6-15-3, 4-15-5, 5-15-4, 2-14-8, 8-14-2, 3-14-7, 7-14-3, 4-14-6, 6-14-4, 5-14-5, 3-13-8, 8-13-3, 4-13-7, 7-13-4, 5-13-6, 6-13-5, 4-12-8, 8-12-4, 5-12-7, 7-12-5, 6-12-6, 5-11-8, 8-11-5, 6-11-7, or 7-11-6. The numbers indicate the number of nucleosides in X, Y, and Z regions in the 5′-X-Y-Z-3′ gapmer.

[0589] In some embodiments, one or more nucleosides in the 5′wing region of a gapmer (X in the 5′-X-Y-Z-3′ formula) or the 3′wing region of a gapmer (Z in the 5′-X-Y-Z-3′ formula) are modified nucleotides (e.g., high-affinity modified nucleosides). In some embodiments, the modified nucleoside (e.g., high-affinity modified nucleosides) is a 2′-modified nucleoside. In some embodiments, the 2′-modified nucleoside is a 2′-4′ bicyclic nucleoside or a non-bicyclic 2′-modified nucleoside. In some embodiments, the high-affinity modified nucleoside is a 2′-4′ bicyclic nucleoside (e.g., LNA, cEt, or ENA) or a non-bicyclic 2′-modified nucleoside (e.g., 2′-fluoro (2′-F), 2′-O-methyl (2′-O-Me), 2′-O-methoxyethyl (2′-MOE), 2′-O-aminopropyl (2′-O-AP), 2′-O-dimethylaminoethyl (2′-O-DMAOE), 2′-O-dimethylaminopropyl (2′-O-DMAP), 2′-O-dimethylaminoethyloxyethyl (2′-O-DMAEOE), or 2′-O—N-methylacetamido (2′-O-NMA)).

[0590] In some embodiments, one or more nucleosides in the 5′wing region of a gapmer (X in the 5′-X-Y-Z-3′ formula) are high-affinity modified nucleosides. In some embodiments, each nucleoside in the 5′wing region of the gapmer (X in the 5′-X-Y-Z-3′ formula) is a high-affinity modified nucleoside. In some embodiments, one or more nucleosides in the 3′wing region of a gapmer (Z in the 5′-X-Y-Z-3′ formula) are high-affinity modified nucleosides. In some embodiments, each nucleoside in the 3′wing region of the gapmer (Z in the 5′-X-Y-Z-3′ formula) is a high-affinity modified nucleoside. In some embodiments, one or more nucleosides in the 5′wing region of the gapmer (X in the 5′-X-Y-Z-3′ formula) are high-affinity modified nucleosides and one or more nucleosides in the 3′wing region of the gapmer (Z in the 5′-X-Y-Z-3′ formula) are high-affinity modified nucleosides. In some embodiments, each nucleoside in the 5′wing region of the gapmer (X in the 5′-X-Y-Z-3′ formula) is a high-affinity modified nucleoside and each nucleoside in the 3′wing region of the gapmer (Z in the 5′-X-Y-Z-3′ formula) is high-affinity modified nucleoside.

[0591] In some embodiments, the 5′wing region of a gapmer (X in the 5′-X-Y-Z-3′ formula) comprises the same high affinity nucleosides as the 3′wing region of the gapmer (Z in the 5′-X-Y-Z-3′ formula). For example, the 5′wing region of the gapmer (X in the 5′-X-Y-Z-3′ formula) and the 3′wing region of the gapmer (Z in the 5′-X-Y-Z-3′ formula) may comprise one or more non-bicyclic 2′-modified nucleosides (e.g., 2′-MOE or 2′-O-Me). In another example, the 5′wing region of the gapmer (X in the 5′-X-Y-Z-3′ formula) and the 3′wing region of the gapmer (Z in the 5′-X-Y-Z-3′ formula) may comprise one or more 2′-4′ bicyclic nucleosides (e.g., LNA or cEt). In some embodiments, each nucleoside in the 5′wing region of the gapmer (X in the 5′-X-Y-Z-3′ formula) and the 3′wing region of the gapmer (Z in the 5′-X-Y-Z-3′ formula) is a non-bicyclic 2′-modified nucleosides (e.g., 2′-MOE or 2′-O-Me). In some embodiments, each nucleoside in the 5′wing region of the gapmer (X in the 5′-X-Y-Z-3′ formula) and the 3′wing region of the gapmer (Z in the 5′-X-Y-Z-3′ formula) is a 2′-4′ bicyclic nucleosides (e.g., LNA or cEt).

[0592] In some embodiments, a gapmer comprises a 5′-X-Y-Z-3′ configuration, wherein X and Z is independently 1-7 (e.g., 1, 2, 3, 4, 5, 6, or 7) nucleosides in length and Y is 6-10 (e.g., 6, 7, 8, 9, or 10) nucleosides in length, wherein each nucleoside in X and Z is a non-bicyclic 2′-modified nucleosides (e.g., 2′-MOE or 2′-O-Me) and each nucleoside in Y is a 2′-deoxyribonucleoside. In some embodiments, the gapmer comprises a 5′-X-Y-Z-3′ configuration, wherein X and Z is independently 1-7 (e.g., 1, 2, 3, 4, 5, 6, or 7) nucleosides in length and Y is 6-10 (e.g., 6, 7, 8, 9, or 10) nucleosides in length, wherein each nucleoside in X and Z is a 2′-4′ bicyclic nucleosides (e.g., LNA or cEt) and each nucleoside in Y is a 2′-deoxyribonucleoside. In some embodiments, the 5′wing region of the gapmer (X in the 5′-X-Y-Z-3′ formula) comprises different high affinity nucleosides as the 3′wing region of the gapmer (Z in the 5′-X-Y-Z-3′ formula). For example, the 5′wing region of the gapmer (X in the 5′-X-Y-Z-3′ formula) may comprise one or more non-bicyclic 2′-modified nucleosides (e.g., 2′-MOE or 2′-O-Me) and the 3′wing region of the gapmer (Z in the 5′-X-Y-Z-3′ formula) may comprise one or more 2′-4′ bicyclic nucleosides (e.g., LNA or cEt). In another example, the 3′wing region of the gapmer (Z in the 5′-X-Y-Z-3′ formula) may comprise one or more non-bicyclic 2′-modified nucleosides (e.g., 2′-MOE or 2′-O-Me) and the 5′wing region of the gapmer (X in the 5′-X-Y-Z-3′ formula) may comprise one or more 2′-4′ bicyclic nucleosides (e.g., LNA or cEt).

[0593] In some embodiments, a gapmer comprises a 5′-X-Y-Z-3′ configuration, wherein X and Z is independently 1-7 (e.g., 1, 2, 3, 4, 5, 6, or 7) nucleosides in length and Y is 6-10 (e.g., 6, 7, 8, 9, or 10) nucleosides in length, wherein each nucleoside in X is a non-bicyclic 2′-modified nucleosides (e.g., 2′-MOE or 2′-O-Me), each nucleoside in Z is a 2′-4′ bicyclic nucleosides (e.g., LNA or cEt), and each nucleoside in Y is a 2′-deoxyribonucleoside. In some embodiments, the gapmer comprises a 5′-X-Y-Z-3′ configuration, wherein X and Z is independently 1-7 (e.g., 1, 2, 3, 4, 5, 6, or 7) nucleosides in length and Y is 6-10 (e.g., 6, 7, 8, 9, or 10) nucleosides in length, wherein each nucleoside in X is a 2′-4′ bicyclic nucleosides (e.g., LNA or cEt), each nucleoside in Z is a non-bicyclic 2′-modified nucleosides (e.g., 2′-MOE or 2′-O-Me) and each nucleoside in Y is a 2′-deoxyribonucleoside.

[0594] In some embodiments, the 5′wing region of a gapmer (X in the 5′-X-Y-Z-3′ formula) comprises one or more non-bicyclic 2′-modified nucleosides (e.g., 2′-MOE or 2′ Me) and one or more 2′-4′ bicyclic nucleosides (e.g., LNA or cEt). In some embodiments, the 3′wing region of the gapmer (Z in the 5′-X-Y-Z-3′ formula) comprises one or more non-bicyclic 2′-modified nucleosides (e.g., 2′-MOE or 2′-O-Me) and one or more 2′-4′ bicyclic nucleosides (e.g., LNA or cEt). In some embodiments, both the 5′wing region of the gapmer (X in the 5′-X-Y-Z-3′ formula) and the 3′wing region of the gapmer (Z in the 5′-X-Y-Z-3′ formula) comprise one or more non-bicyclic 2′-modified nucleosides (e.g., 2′-MOE or 2′-O-Me) and one or more 2′-4′ bicyclic nucleosides (e.g., LNA or cEt).

[0595] In some embodiments, a gapmer comprises a 5′-X-Y-Z-3′ configuration, wherein X and Z is independently 2-7 (e.g., 2, 3, 4, 5, 6, or 7) nucleosides in length and Y is 6-10 (e.g., 6, 7, 8, 9, or 10) nucleosides in length, wherein at least one but not all (e.g., 1, 2, 3, 4, 5, or 6) of positions 1, 2, 3, 4, 5, 6, or 7 in X (the 5′ most position is position 1) is a non-bicyclic 2′-modified nucleoside (e.g., 2′-MOE or 2′-O-Me), wherein the rest of the nucleosides in both X and Z are 2′-4′ bicyclic nucleosides (e.g., LNA or cEt), and wherein each nucleoside in Y is a 2′deoxyribonucleoside. In some embodiments, the gapmer comprises a 5′-X-Y-Z-3′ configuration, wherein X and Z is independently 2-7 (e.g., 2, 3, 4, 5, 6, or 7) nucleosides in length and Y is 6-10 (e.g., 6, 7, 8, 9, or 10) nucleosides in length, wherein at least one but not all (e.g., 1, 2, 3, 4, 5, or 6) of positions 1, 2, 3, 4, 5, 6, or 7 in Z (the 5′ most position is position 1) is a non-bicyclic 2′-modified nucleoside (e.g., 2′-MOE or 2′-O-Me), wherein the rest of the nucleosides in both X and Z are 2′-4′ bicyclic nucleosides (e.g., LNA or cEt), and wherein each nucleoside in Y is a 2′deoxyribonucleoside. In some embodiments, the gapmer comprises a 5′-X-Y-Z-3′ configuration, wherein X and Z is independently 2-7 (e.g., 2, 3, 4, 5, 6, or 7) nucleosides in length and Y is 6-10 (e.g., 6, 7, 8, 9, or 10) nucleosides in length, wherein at least one but not all (e.g., 1, 2, 3, 4, 5, or 6) of positions 1, 2, 3, 4, 5, 6, or 7 in X and at least one of positions but not all (e.g., 1, 2, 3, 4, 5, or 6) 1, 2, 3, 4, 5, 6, or 7 in Z (the 5′ most position is position 1) is a non-bicyclic 2′-modified nucleoside (e.g., 2′-MOE or 2′-O-Me), wherein the rest of the nucleosides in both X and Z are 2′-4′ bicyclic nucleosides (e.g., LNA or cEt), and wherein each nucleoside in Y is a 2′deoxyribonucleoside.

[0596] Non-limiting examples of gapmers configurations with a mix of non-bicyclic 2′-modified nucleoside (e.g., 2′-MOE or 2′-O-Me) and 2′-4′ bicyclic nucleosides (e.g., LNA or cEt) in the 5′wing region of the gapmer (X in the 5′-X-Y-Z-3′ formula) and/or the 3′wing region of the gapmer (Z in the 5′-X-Y-Z-3′ formula) include: BBB-(D)n-BBBAA; KKK-(D)n-KKKAA; LLL-(D)n-LLLAA; BBB-(D)n-BBBEE; KKK-(D)n-KKKEE; LLL-(D)n-LLLEE; BBB-(D)n-BBBAA; KKK-(D)n-KKKAA; LLL-(D)n-LLLAA; BBB-(D)n-BBBEE; KKK-(D)n-KKKEE; LLL-(D)n-LLLEE; BBB-(D)n-BBBAAA; KKK-(D)n-KKKAAA; LLL-(D)n-LLLAAA; BBB-(D)n-BBBEEE; KKK-(D)n-KKKEEE; LLL-(D)n-LLLEEE; BBB-(D)n-BBBAAA; KKK-(D)n-KKKAAA; LLL-(D)n-LLLAAA; BBB-(D)n-BBBEEE; KKK-(D)n-KKKEEE; LLL-(D)n-LLLEEE; BABA-(D)n-ABAB; KAKA-(D)n-AKAK; LALA-(D)n-ALAL; BEBE-(D)n-EBEB; KEKE-(D)n-EKEK; LELE-(D)n-ELEL; BABA-(D)n-ABAB; KAKA-(D)n-AKAK; LALA-(D)n-ALAL; BEBE-(D)n-EBEB; KEKE-(D)n-EKEK; LELE-(D)n-ELEL; ABAB-(D)n-ABAB; AKAK-(D)n-AKAK; ALAL-(D)n-ALAL; EBEB-(D)n-EBEB; EKEK-(D)n-EKEK; ELEL-(D)n-ELEL; ABAB-(D)n-ABAB; AKAK-(D)n-AKAK; ALAL-(D)n-ALAL; EBEB-(D)n-EBEB; EKEK-(D)n-EKEK; ELEL-(D)n-ELEL; AABB-(D)n-BBAA; BBAA-(D)n-AABB; AAKK-(D)n-KKAA; AALL-(D)n-LLAA; EEBB-(D)n-BBEE; EEKK-(D)n-KKEE; EELL-(D)n-LLEE; AABB-(D)n-BBAA; AAKK-(D)n-KKAA; AALL-(D)n-LLAA; EEBB-(D)n-BBEE; EEKK-(D)n-KKEE; EELL-(D)n-LLEE; BBB-(D)n-BBA; KKK-(D)n-KKA; LLL-(D)n-LLA; BBB-(D)n-BBE; KKK-(D)n-KKE; LLL-(D)n-LLE; BBB-(D)n-BBA; KKK-(D)n-KKA; LLL-(D)n-LLA; BBB-(D)n-BBE; KKK-(D)n-KKE; LLL-(D)n-LLE; BBB-(D)n-BBA; KKK-(D)n-KKA; LLL-(D)n-LLA; BBB-(D)n-BBE; KKK-(D)n-KKE; LLL-(D)n-LLE; ABBB-(D)n-BBBA; AKKK-(D)n-KKKA; ALLL-(D)n-LLLA; EBBB-(D)n-BBBE; EKKK-(D)n-KKKE; ELLL-(D)n-LLLE; ABBB-(D)n-BBBA; AKKK-(D)n-KKKA; ALLL-(D)n-LLLA; EBBB-(D)n-BBBE; EKKK-(D)n-KKKE; ELLL-(D)n-LLLE; ABBB-(D)n-BBBAA; AKKK-(D)n-KKKAA; ALLL-(D)n-LLLAA; EBBB-(D)n-BBBEE; EKKK-(D)n-KKKEE; ELLL-(D)n-LLLEE; ABBB-(D)n-BBBAA; AKKK-(D)n-KKKAA; ALLL-(D)n-LLLAA; EBBB-(D)n-BBBEE; EKKK-(D)n-KKKEE; ELLL-(D)n-LLLEE; AABBB-(D)n-BBB; AAKKK-(D)n-KKK; AALLL-(D)n-LLL; EEBBB-(D)n-BBB; EEKKK-(D)n-KKK; EELLL-(D)n-LLL; AABBB-(D)n-BBB; AAKKK-(D)n-KKK; AALLL-(D)n-LLL; EEBBB-(D)n-BBB; EEKKK-(D)n-KKK; EELLL-(D)n-LLL; AABBB-(D)n-BBBA; AAKKK-(D)n-KKKA; AALLL-(D)n-LLLA; EEBBB-(D)n-BBBE; EEKKK-(D)n-KKKE; EELLL-(D)n-LLLE; AABBB-(D)n-BBBA; AAKKK-(D)n-KKKA; AALLL-(D)n-LLLA; EEBBB-(D)n-BBBE; EEKKK-(D)n-KKKE; EELLL-(D)n-LLLE; ABBAABB-(D)n-BB; AKKAAKK-(D)n-KK; ALLAALLL-(D)n-LL; EBBEEBB-(D)n-BB; EKKEEKK-(D)n-KK; ELLEELL-(D)n-LL; ABBAABB-(D)n-BB; AKKAAKK-(D)n-KK; ALLAALL-(D)n-LL; EBBEEBB-(D)n-BB; EKKEEKK-(D)n-KK; ELLEELL-(D)n-LL; ABBABB-(D)n-BBB; AKKAKK-(D)n-KKK; ALLALLL-(D)n-LLL; EBBEBB-(D)n-BBB; EKKEKK-(D)n-KKK; ELLELL-(D)n-LLL; ABBABB-(D)n-BBB; AKKAKK-(D)n-KKK; ALLALL-(D)n-LLL; EBBEBB-(D)n-BBB; EKKEKK-(D)n-KKK; ELLELL-(D)n-LLL; EEEK-(D)n-EEEEEEEE; EEK-(D)n-EEEEEEEEE; EK-(D)n-EEEEEEEEEE; EK-(D)n-EEEKK; K-(D)n-EEEKEKE; K-(D)n-EEEKEKEE; K-(D)n-EEKEK; EK-(D)n-EEEEKEKE; EK-(D)n-EEEKEK; EEK-(D)n-KEEKE; EK-(D)n-EEKEK; EK-(D)n-KEEK; EEK-(D)n-EEEKEK; EK-(D)n-KEEEKEE; EK-(D)n-EEKEKE; EK-(D)n-EEEKEKE; and EK-(D)n-EEEEKEK;. “A” nucleosides comprise a 2′-modified nucleoside; “B” represents a 2′-4′ bicyclic nucleoside; “K” represents a constrained ethyl nucleoside (cEt); “L” represents an LNA nucleoside; and “E” represents a 2′-MOE modified ribonucleoside; “D” represents a 2′-deoxyribonucleoside; “n” represents the length of the gap segment (Y in the 5′-X-Y-Z-3′ configuration) and is an integer between 1-20.

[0597] In some embodiments, any one of the gapmers described herein comprises one or more modified nucleoside linkages (e.g., a phosphorothioate linkage) in each of the X, Y, and Z regions. In some embodiments, each internucleoside linkage in the any one of the gapmers described herein is a phosphorothioate linkage. In some embodiments, each of the X, Y, and Z regions independently comprises a mix of phosphorothioate linkages and phosphodiester linkages. In some embodiments, each internucleoside linkage in the gap region Y is a phosphorothioate linkage, the 5′wing region X comprises a mix of phosphorothioate linkages and phosphodiester linkages, and the 3′wing region Z comprises a mix of phosphorothioate linkages and phosphodiester linkages.

[0598] i. Mixmers

[0599] In some embodiments, an oligonucleotide described herein may be a mixmer or comprise a mixmer sequence pattern. In general, mixmers are oligonucleotides that comprise both naturally and non-naturally occurring nucleosides or comprise two different types of non-naturally occurring nucleosides typically in an alternating pattern. Mixmers generally have higher binding affinity than unmodified oligonucleotides and may be used to specifically bind a target molecule, e.g., to block a binding site on the target molecule. Generally, mixmers do not recruit an RNase to the target molecule and thus do not promote cleavage of the target molecule. Such oligonucleotides that are incapable of recruiting RNase H have been described, for example, see WO2007/112754 or WO2007/112753.

[0600] In some embodiments, the mixmer comprises or consists of a repeating pattern of nucleoside analogues and naturally occurring nucleosides, or one type of nucleoside analogue and a second type of nucleoside analogue. However, a mixmer need not comprise a repeating pattern and may instead comprise any arrangement of modified nucleoside s and naturally occurring nucleoside s or any arrangement of one type of modified nucleoside and a second type of modified nucleoside. The repeating pattern, may, for instance be every second or every third nucleoside is a modified nucleoside, such as LNA, and the remaining nucleoside s are naturally occurring nucleosides, such as DNA, or are a 2′ substituted nucleoside analogue such as 2′-MOE or 2′ fluoro analogues, or any other modified nucleoside described herein. It is recognized that the repeating pattern of modified nucleoside, such as LNA units, may be combined with modified nucleoside at fixed positions—e.g. at the 5′ or 3′ termini.

[0601] In some embodiments, a mixmer does not comprise a region of more than 5, more than 4, more than 3, or more than 2 consecutive naturally occurring nucleosides, such as DNA nucleosides. In some embodiments, the mixmer comprises at least a region consisting of at least two consecutive modified nucleoside, such as at least two consecutive LNAs. In some embodiments, the mixmer comprises at least a region consisting of at least three consecutive modified nucleoside units, such as at least three consecutive LNAs.

[0602] In some embodiments, the mixmer does not comprise a region of more than 7, more than 6, more than 5, more than 4, more than 3, or more than 2 consecutive nucleoside analogues, such as LNAs. In some embodiments, LNA units may be replaced with other nucleoside analogues, such as those referred to herein.

[0603] Mixmers may be designed to comprise a mixture of affinity enhancing modified nucleosides, such as in non-limiting example LNA nucleosides and 2′-O-Me nucleosides. In some embodiments, a mixmer comprises modified internucleoside linkages (e.g., phosphorothioate internucleoside linkages or other linkages) between at least two, at least three, at least four, at least five or more nucleosides.

[0604] A mixmer may be produced using any suitable method. Representative U.S. patents, U.S. patent publications, and PCT publications that teach the preparation of mixmers include U.S. patent publication Nos. US20060128646, US20090209748, US20090298916, US20110077288, and US20120322851, and U.S. Pat. No. 7,687,617.

[0605] In some embodiments, a mixmer comprises one or more morpholino nucleosides. For example, in some embodiments, a mixmer may comprise morpholino nucleosides mixed (e.g., in an alternating manner) with one or more other nucleosides (e.g., DNA, RNA nucleosides) or modified nucleosides (e.g., LNA, 2′-O-Me nucleosides).

[0606] In some embodiments, mixmers are useful for splice correcting or exon skipping, for example, as reported in Touznik A., et al., LNA/DNA mixmer-based antisense oligonucleotides correct alternative splicing of the SMN2 gene and restore SMN protein expression in type 1 SMA fibroblasts Scientific Reports, volume 7, Article number: 3672 (2017), Chen S. et al., Synthesis of a Morpholino Nucleic Acid (MNA)-Uridine Phosphoramidite, and Exon Skipping Using MNA/2′-O-Methyl Mixmer Antisense Oligonucleotide, Molecules 2016, 21, 1582, the contents of each which are incorporated herein by reference.

[0607] j. RNA Interference (RNAi)

[0608] In some embodiments, oligonucleotides provided herein may be in the form of small interfering RNAs (siRNA), also known as short interfering RNA or silencing RNA. SiRNA, is a class of double-stranded RNA molecules, typically about 20-25 base pairs in length that target nucleic acids (e.g., mRNAs) for degradation via the RNA interference (RNAi) pathway in cells. Specificity of siRNA molecules may be determined by the binding of the antisense strand of the molecule to its target RNA. Effective siRNA molecules are generally less than 30 to 35 base pairs in length to prevent the triggering of non-specific RNA interference pathways in the cell via the interferon response, although longer siRNA can also be effective. In some embodiments, the siRNA molecules are 7, 8, 9, 10, 11, 12, 13, 14, 15, 16, 17, 18, 19, 20, 21, 22, 23, 24, 25, 26, 27, 28, 29, 30, 35, 40, 45, 50, or more base pairs in length. In some embodiments, the siRNA molecules are 8 to 30 base pairs in length, 10 to 15 base pairs in length, 10 to 20 base pairs in length, 15 to 25 base pairs in length, 19 to 21 base pairs in length, 21 to 23 base pairs in length.

[0609] Following selection of an appropriate target RNA sequence, siRNA molecules that comprise a nucleotide sequence complementary to all or a portion of the target sequence, i.e. an antisense sequence, can be designed and prepared using appropriate methods (see, e.g., PCT Publication Number WO 2004/016735; and U.S. Patent Publication Nos. 2004/0077574 and 2008/0081791). The siRNA molecule can be double stranded (i.e. a dsRNA molecule comprising an antisense strand and a complementary sense strand) or single-stranded (i.e. a ssRNA molecule comprising just an antisense strand). The siRNA molecules can comprise a duplex, asymmetric duplex, hairpin or asymmetric hairpin secondary structure, having self-complementary sense and antisense strands.

[0610] In some embodiments, the antisense strand of the siRNA molecule is 7, 8, 9, 10, 11, 12, 13, 14, 15, 16, 17, 18, 19, 20, 21, 22, 23, 24, 25, 26, 27, 28, 29, 30, 35, 40, 45, 50, or more nucleotides in length. In some embodiments, the antisense strand is 8 to 50 nucleotides in length, 8 to 40 nucleotides in length, 8 to 30 nucleotides in length, 10 to 15 nucleotides in length, 10 to 20 nucleotides in length, 15 to 25 nucleotides in length, 19 to 21 nucleotides in length, 21 to 23 nucleotides in lengths.

[0611] In some embodiments, the sense strand of the siRNA molecule is 7, 8, 9, 10, 11, 12, 13, 14, 15, 16, 17, 18, 19, 20, 21, 22, 23, 24, 25, 26, 27, 28, 29, 30, 35, 40, 45, 50, or more nucleotides in length. In some embodiments, the sense strand is 8 to 50 nucleotides in length, 8 to 40 nucleotides in length, 8 to 30 nucleotides in length, 10 to 15 nucleotides in length, 10 to 20 nucleotides in length, 15 to 25 nucleotides in length, 19 to 21 nucleotides in length, 21 to 23 nucleotides in lengths.

[0612] In some embodiments, siRNA molecules comprise an antisense strand comprising a region of complementarity to a target region in a target mRNA. In some embodiments, the region of complementarity is at least 80%, at least 85%, at least 90%, at least 91%, at least 92%, at least 93%, at least 94%, at least 95%, at least 96%, at least 97%, at least 98%, at least 99% or 100% complementary to a target region in a target mRNA. In some embodiments, the target region is a region of consecutive nucleotides in the target mRNA. In some embodiments, a complementary nucleotide sequence need not be 100% complementary to that of its target to be specifically hybridizable or specific for a target RNA sequence.

[0613] In some embodiments, siRNA molecules comprise an antisense strand that comprises a region of complementarity to a target RNA sequence and the region of complementarity is in the range of 8 to 15, 8 to 30, 8 to 40, or 10 to 50, or 5 to 50, or 5 to 40 nucleotides in length. In some embodiments, a region of complementarity is 5, 6, 7, 8, 9, 10, 11, 12, 13, 14, 15, 16, 17, 18, 19, 20, 21, 22, 23, 24, 25, 26, 27, 28, 29, 30, 31, 32, 33, 34, 35, 36, 37, 38, 39, 40, 41, 42, 43, 44, 45, 46, 47, 48, 49, or 50 nucleotides in length. In some embodiments, the region of complementarity is complementary with at least 6, at least 7, at least 8, at least 9, at least 10, at least 11, at least 12, at least 13, at least 14, at least 15, at least 16, at least 17, at least 18, at least 19, at least 20, at least 21, at least 22, at least 23, at least 24, at least 25 or more consecutive nucleotides of a target RNA sequence. In some embodiments, siRNA molecules comprise a nucleotide sequence that contains no more than 1, 2, 3, 4, or 5 base mismatches compared to the portion of the consecutive nucleotides of target RNA sequence. In some embodiments, siRNA molecules comprise a nucleotide sequence that has up to 3 mismatches over 15 bases, or up to 2 mismatches over 10 bases.

[0614] In some embodiments, siRNA molecules comprise an antisense strand comprising a nucleotide sequence that is complementary (e.g., at least 85%, at least 90%, at least 95%, or 100%) to the target RNA sequence of the oligonucleotides provided herein (e.g., in Table 10 and Table 16). In some embodiments, siRNA molecules comprise an antisense strand comprising a nucleotide sequence that is at least 85%, at least 90%, at least 95%, or 100% identical to the oligonucleotides provided herein (e.g., in Table 10 and Table 16). In some embodiments, siRNA molecules comprise an antisense strand comprising at least 6, at least 7, at least 8, at least 9, at least 10, at least 11, at least 12, at least 13, at least 14, at least 15, at least 16, at least 17, at least 18, at least 19, at least 20, at least 21, at least 22, at least 23, at least 24, at least 25 or more consecutive nucleotides of the oligonucleotides provided herein (e.g., in Table 10 and Table 16).

[0615] Double-stranded siRNA may comprise sense and anti-sense RNA strands that are the same length or different lengths. Double-stranded siRNA molecules can also be assembled from a single oligonucleotide in a stem-loop structure, wherein self-complementary sense and antisense regions of the siRNA molecule are linked by means of a nucleic acid based or non-nucleic acid-based linker(s), as well as circular single-stranded RNA having two or more loop structures and a stem comprising self-complementary sense and antisense strands, wherein the circular RNA can be processed either in vivo or in vitro to generate an active siRNA molecule capable of mediating RNAi. Small hairpin RNA (shRNA) molecules thus are also contemplated herein. These molecules comprise a specific antisense sequence in addition to the reverse complement (sense) sequence, typically separated by a spacer or loop sequence. Cleavage of the spacer or loop provides a single-stranded RNA molecule and its reverse complement, such that they may anneal to form a dsRNA molecule (optionally with additional processing steps that may result in addition or removal of one, two, three or more nucleotides from the 3′ end and/or (e.g., and) the 5′ end of either or both strands). A spacer can be of a sufficient length to permit the antisense and sense sequences to anneal and form a double-stranded structure (or stem) prior to cleavage of the spacer (and, optionally, subsequent processing steps that may result in addition or removal of one, two, three, four, or more nucleotides from the 3′ end and/or (e.g., and) the 5′ end of either or both strands). A spacer sequence is may be an unrelated nucleotide sequence that is situated between two complementary nucleotide sequence regions which, when annealed into a double-stranded nucleic acid, comprise a shRNA.

[0616] The overall length of the siRNA molecules can vary from about 14 to about 100 nucleotides depending on the type of siRNA molecule being designed. Generally between about 14 and about 50 of these nucleotides are complementary to the RNA target sequence, i.e. constitute the specific antisense sequence of the siRNA molecule. For example, when the siRNA is a double- or single-stranded siRNA, the length can vary from about 14 to about 50 nucleotides, whereas when the siRNA is a shRNA or circular molecule, the length can vary from about 40 nucleotides to about 100 nucleotides.

[0617] An siRNA molecule may comprise a 3′ overhang at one end of the molecule, The other end may be blunt-ended or have also an overhang (5′ or 3′). When the siRNA molecule comprises an overhang at both ends of the molecule, the length of the overhangs may be the same or different. In one embodiment, the siRNA molecule of the present disclosure comprises 3′ overhangs of about 1 to about 3 nucleotides on both ends of the molecule. In some embodiments, the siRNA molecule comprises 3′ overhangs of about 1 to about 3 nucleotides on the sense strand. In some embodiments, the siRNA molecule comprises 3′ overhangs of about 1 to about 3 nucleotides on the antisense strand. In some embodiments, the siRNA molecule comprises 3′ overhangs of about 1 to about 3 nucleotides on both the sense strand and the antisense strand.

[0618] In some embodiments, the siRNA molecule comprises one or more modified nucleotides (e.g. 1, 2, 3, 4, 5, 6, 7, 8, 9, 10 or more). In some embodiments, the siRNA molecule comprises one or more modified nucleotides and/or (e.g., and) one or more modified internucleotide linkages. In some embodiments, the modified nucleotide is a modified sugar moiety (e.g. a 2′ modified nucleotide). In some embodiments, the siRNA molecule comprises one or more 2′ modified nucleotides, e.g., a 2′-deoxy, 2′-fluoro (2′-F), 2′-O-methyl (2′-O-Me), 2′-O-methoxyethyl (2′-MOE), 2′-O-aminopropyl (2′-O-AP), 2′-O-dimethylaminoethyl (2′-O-DMAOE), 2′-O-dimethylaminopropyl (2′-O-DMAP), 2′-O-dimethylaminoethyloxyethyl (2′-O-DMAEOE), or 2′-O—N-methylacetamido (2′-O-NMA). In some embodiments, each nucleotide of the siRNA molecule is a modified nucleotide (e.g., a 2′-modified nucleotide). In some embodiments, the siRNA molecule comprises one or more phosphorodiamidate morpholinos. In some embodiments, each nucleotide of the siRNA molecule is a phosphorodiamidate morpholino.

[0619] In some embodiments, the siRNA molecule contains a phosphorothioate or other modified internucleotide linkage. In some embodiments, the siRNA molecule comprises phosphorothioate internucleoside linkages. In some embodiments, the siRNA molecule comprises phosphorothioate internucleoside linkages between at least two nucleotides. In some embodiments, the siRNA molecule comprises phosphorothioate internucleoside linkages between all nucleotides. For example, in some embodiments, the siRNA molecule comprises modified internucleotide linkages at the first, second, and/or (e.g., and) third internucleoside linkage at the 5′ or 3′ end of the siRNA molecule.

[0620] In some embodiments, the modified internucleotide linkages are phosphorus-containing linkages. In some embodiments, phosphorus-containing linkages that may be used include, but are not limited to, phosphorothioates, chiral phosphorothioates, phosphorodithioates, phosphotriesters, aminoalkylphosphotriesters, methyl and other alkyl phosphonates comprising 3′alkylene phosphonates and chiral phosphonates, phosphinates, phosphoramidates comprising 3′-amino phosphoramidate and aminoalkylphosphoramidates, thionophosphoramidates, thionoalkylphosphonates, thionoalkylphosphotriesters, and boranophosphates having normal 3′-5′ linkages, 2′-5′ linked analogs of these, and those having inverted polarity wherein the adjacent pairs of nucleoside units are linked 3′-5′ to 5′-3′ or 2′-5′ to 5′-2′; see U.S. Pat. Nos. 3,687,808; 4,469,863; 4,476,301; 5,023,243; 5,177,196; 5,188,897; 5,264,423; 5,276,019; 5,278,302; 5,286,717; 5,321,131; 5,399,676; 5,405,939; 5,453,496; 5,455, 233; 5,466,677; 5,476,925; 5,519,126; 5,536,821; 5,541,306; 5,550,111; 5,563, 253; 5,571,799; 5,587,361; and 5,625,050.

[0621] Any of the modified chemistries or formats of siRNA molecules described herein can be combined with each other. For example, one, two, three, four, five, or more different types of modifications can be included within the same siRNA molecule.

[0622] In some embodiments, the antisense strand comprises one or more modified nucleotides (e.g. 1, 2, 3, 4, 5, 6, 7, 8, 9, 10 or more). In some embodiments, the antisense strand comprises one or more modified nucleotides and/or (e.g., and) one or more modified internucleotide linkages. In some embodiments, the modified nucleotide comprises a modified sugar moiety (e.g. a 2′ modified nucleotide). In some embodiments, the antisense strand comprises one or more 2′ modified nucleotides, e.g., a 2′-deoxy, 2′-fluoro (2′-F), 2′-O-methyl (2′-O-Me), 2′-O-methoxyethyl (2′-MOE), 2′-O-aminopropyl (2′-O-AP), 2′-O-dimethylaminoethyl (2′-O-DMAOE), 2′-O-dimethylaminopropyl (2′-O-DMAP), 2′-O-dimethylaminoethyloxyethyl (2′-O-DMAEOE), or 2′-O—N-methylacetamido (2′-O-NMA). In some embodiments, each nucleotide of the antisense strand is a modified nucleotide (e.g., a 2′-modified nucleotide). In some embodiments, the antisense strand comprises one or more phosphorodiamidate morpholinos. In some embodiments, the antisense strand is a phosphorodiamidate morpholino oligomer (PMO).

[0623] In some embodiments, antisense strand contains a phosphorothioate or other modified internucleotide linkage. In some embodiments, the antisense strand comprises phosphorothioate internucleoside linkages. In some embodiments, the antisense strand comprises phosphorothioate internucleoside linkages between at least two nucleotides. In some embodiments, the antisense strand comprises phosphorothioate internucleoside linkages between all nucleotides. For example, in some embodiments, the antisense strand comprises modified internucleotide linkages at the first, second, and/or (e.g., and) third internucleoside linkage at the 5′ or 3′ end of the siRNA molecule. In some embodiments, the modified internucleotide linkages are phosphorus-containing linkages. In some embodiments, phosphorus-containing linkages that may be used include, but are not limited to, phosphorothioates, chiral phosphorothioates, phosphorodithioates, phosphotriesters, aminoalkylphosphotriesters, methyl and other alkyl phosphonates comprising 3′alkylene phosphonates and chiral phosphonates, phosphinates, phosphoramidates comprising 3′-amino phosphoramidate and aminoalkylphosphoramidates, thionophosphoramidates, thionoalkylphosphonates, thionoalkylphosphotriesters, and boranophosphates having normal 3′-5′ linkages, 2′-5′ linked analogs of these, and those having inverted polarity wherein the adjacent pairs of nucleoside units are linked 3′-5′ to 5′-3′ or 2′-5′ to 5′-2′; see U.S. Pat. Nos. 3,687,808; 4,469,863; 4,476,301; 5,023,243; 5,177,196; 5,188,897; 5,264,423; 5,276,019; 5,278,302; 5,286,717; 5,321,131; 5,399,676; 5,405,939; 5,453,496; 5,455, 233; 5,466,677; 5,476,925; 5,519,126; 5,536,821; 5,541,306; 5,550,111; 5,563, 253; 5,571,799; 5,587,361; and 5,625,050.

[0624] Any of the modified chemistries or formats of the antisense strand described herein can be combined with each other. For example, one, two, three, four, five, or more different types of modifications can be included within the same antisense strand.

[0625] In some embodiments, the sense strand comprises one or more modified nucleotides (e.g. 1, 2, 3, 4, 5, 6, 7, 8, 9, 10 or more). In some embodiments, the sense strand comprises one or more modified nucleotides and/or (e.g., and) one or more modified internucleotide linkages. In some embodiments, the modified nucleotide is a modified sugar moiety (e.g. a 2′ modified nucleotide). In some embodiments, the sense strand comprises one or more 2′ modified nucleotides, e.g., a 2′-deoxy, 2′-fluoro (2′-F), 2′-O-methyl (2′-O-Me), 2′-O-methoxyethyl (2′-MOE), 2′-O-aminopropyl (2′-O-AP), 2′-O-dimethylaminoethyl (2′-O-DMAOE), 2′-O-dimethylaminopropyl (2′-O-DMAP), 2′-O-dimethylaminoethyloxyethyl (2′-O-DMAEOE), or 2′-O—N-methylacetamido (2′-O-NMA). In some embodiments, each nucleotide of the sense strand is a modified nucleotide (e.g., a 2′-modified nucleotide). In some embodiments, the sense strand comprises one or more phosphorodiamidate morpholinos. In some embodiments, the antisense strand is a phosphorodiamidate morpholino oligomer (PMO). In some embodiments, the sense strand contains a phosphorothioate or other modified internucleotide linkage. In some embodiments, the sense strand comprises phosphorothioate internucleoside linkages. In some embodiments, the sense strand comprises phosphorothioate internucleoside linkages between at least two nucleotides. In some embodiments, the sense strand comprises phosphorothioate internucleoside linkages between all nucleotides. For example, in some embodiments, the sense strand comprises modified internucleotide linkages at the first, second, and/or (e.g., and) third internucleoside linkage at the 5′ or 3′ end of the sense strand.

[0626] In some embodiments, the modified internucleotide linkages are phosphorus-containing linkages. In some embodiments, phosphorus-containing linkages that may be used include, but are not limited to, phosphorothioates, chiral phosphorothioates, phosphorodithioates, phosphotriesters, aminoalkylphosphotriesters, methyl and other alkyl phosphonates comprising 3′alkylene phosphonates and chiral phosphonates, phosphinates, phosphoramidates comprising 3′-amino phosphoramidate and aminoalkylphosphoramidates, thionophosphoramidates, thionoalkylphosphonates, thionoalkylphosphotriesters, and boranophosphates having normal 3′-5′ linkages, 2′-5′ linked analogs of these, and those having inverted polarity wherein the adjacent pairs of nucleoside units are linked 3′-5′ to 5′-3′ or 2′-5′ to 5′-2′; see U.S. Pat. Nos. 3,687,808; 4,469,863; 4,476,301; 5,023,243; 5,177,196; 5,188,897; 5,264,423; 5,276,019; 5,278,302; 5,286,717; 5,321,131; 5,399,676; 5,405,939; 5,453,496; 5,455, 233; 5,466,677; 5,476,925; 5,519,126; 5,536,821; 5,541,306; 5,550,111; 5,563, 253; 5,571,799; 5,587,361; and 5,625,050.

[0627] Any of the modified chemistries or formats of the sense strand described herein can be combined with each other. For example, one, two, three, four, five, or more different types of modifications can be included within the same sense strand.

[0628] In some embodiments, the antisense or sense strand of the siRNA molecule comprises modifications that enhance or reduce RNA-induced silencing complex (RISC) loading. In some embodiments, the antisense strand of the siRNA molecule comprises modifications that enhance RISC loading. In some embodiments, the sense strand of the siRNA molecule comprises modifications that reduce RISC loading and reduce off-target effects. In some embodiments, the antisense strand of the siRNA molecule comprises a 2′-O-methoxyethyl (2′-MOE) modification. The addition of the 2′-O-methoxyethyl (2′-MOE) group at the cleavage site improves both the specificity and silencing activity of siRNAs by facilitating the oriented RNA-induced silencing complex (RISC) loading of the modified strand, as described in Song et al., (2017) Mol Ther Nucleic Acids 9:242-250, incorporated herein by reference in its entirety. In some embodiments, the antisense strand of the siRNA molecule comprises a 2′-OMe-phosphorodithioate modification, which increases RISC loading as described in Wu et al., (2014) Nat Commun 5:3459, incorporated herein by reference in its entirety.

[0629] In some embodiments, the sense strand of the siRNA molecule comprises a 5′-morpholino, which reduces RISC loading of the sense strand and improves antisense strand selection and RNAi activity, as described in Kumar et al., (2019) Chem Commun (Camb) 55(35):5139-5142, incorporated herein by reference in its entirety. In some embodiments, the sense strand of the siRNA molecule is modified with a synthetic RNA-like high affinity nucleotide analogue, Locked Nucleic Acid (LNA), which reduces RISC loading of the sense strand and further enhances antisense strand incorporation into RISC, as described in Elman et al., (2005) Nucleic Acids Res. 33(1): 439-447, incorporated herein by reference in its entirety. In some embodiments, the sense strand of the siRNA molecule comprises a 5′ unlocked nucleic acid (UNA) modification, which reduce RISC loading of the sense strand and improve silencing potency of the antisense strand, as described in Snead et al., (2013) Mol Ther Nucleic Acids 2(7):e103, incorporated herein by reference in its entirety. In some embodiments, the sense strand of the siRNA molecule comprises a 5-nitroindole modification, which decreased the RNAi potency of the sense strand and reduces off-target effects as described in Zhang et al., (2012) Chembiochem 13(13):1940-1945, incorporated herein by reference in its entirety. In some embodiments, the sense strand comprises a 2′-O′methyl (2′-0-Me) modification, which reduces RISC loading and the off-target effects of the sense strand, as described in Zheng et al., FASEB (2013) 27(10): 4017-4026, incorporated herein by reference in its entirety. In some embodiments, the sense strand of the siRNA molecule is fully substituted with morpholino, 2′-MOE or 2′-O-Me residues, and are not recognized by RISC as described in Kole et al., (2012) Nature reviews. Drug Discovery 11(2):125-140, incorporated herein by reference in its entirety. In some embodiments the antisense strand of the siRNA molecule comprises a 2′-MOE modification and the sense strand comprises an 2′-O-Me modification (see e.g., Song et al., (2017) Mol Ther Nucleic Acids 9:242-250). In some embodiments at least one (e.g., at least 2, at least 3, at least 4, at least 5, at least 10) siRNA molecule is linked (e.g., covalently) to a muscle-targeting agent. In some embodiments, the muscle-targeting agent may comprise, or consist of, a nucleic acid (e.g., DNA or RNA), a peptide (e.g., an antibody), a lipid (e.g., a microvesicle), or a sugar moiety (e.g., a polysaccharide). In some embodiments, the muscle-targeting agent is an antibody. In some embodiments, the muscle-targeting agent is an anti-transferrin receptor antibody (e.g., any one of the anti-TfR antibodies provided herein). In some embodiments, the muscle-targeting agent may be linked to the 5′ end of the sense strand of the siRNA molecule. In some embodiments, the muscle-targeting agent may be linked to the 3′ end of the sense strand of the siRNA molecule. In some embodiments, the muscle-targeting agent may be linked internally to the sense strand of the siRNA molecule. In some embodiments, the muscle-targeting agent may be linked to the 5′ end of the antisense strand of the siRNA molecule. In some embodiments, the muscle-targeting agent may be linked to the 3′ end of the antisense strand of the siRNA molecule. In some embodiments, the muscle-targeting agent may be linked internally to the antisense strand of the siRNA molecule.

[0630] k. microRNA (miRNAs)

[0631] In some embodiments, an oligonucleotide may be a microRNA (miRNA). MicroRNAs (referred to as “miRNAs”) are small non-coding RNAs, belonging to a class of regulatory molecules that control gene expression by binding to complementary sites on a target RNA transcript. Typically, miRNAs are generated from large RNA precursors (termed pri-miRNAs) that are processed in the nucleus into approximately 70 nucleotide pre-miRNAs, which fold into imperfect stem-loop structures. These pre-miRNAs typically undergo an additional processing step within the cytoplasm where mature miRNAs of 18-25 nucleotides in length are excised from one side of the pre-miRNA hairpin by an RNase III enzyme, Dicer.

[0632] As used herein, miRNAs including pri-miRNA, pre-miRNA, mature miRNA or fragments of variants thereof that retain the biological activity of mature miRNA. In one embodiment, the size range of the miRNA can be from 21 nucleotides to 170 nucleotides. In one embodiment the size range of the miRNA is from 70 to 170 nucleotides in length. In another embodiment, mature miRNAs of from 21 to 25 nucleotides in length can be used.

[0633] l. Aptamers

[0634] In some embodiments, oligonucleotides provided herein may be in the form of aptamers. Generally, in the context of molecular payloads, aptamer is any nucleic acid that binds specifically to a target, such as a small molecule, protein, nucleic acid in a cell. In some embodiments, the aptamer is a DNA aptamer or an RNA aptamer. In some embodiments, a nucleic acid aptamer is a single-stranded DNA or RNA (ssDNA or ssRNA). It is to be understood that a single-stranded nucleic acid aptamer may form helices and/or (e.g., and) loop structures. The nucleic acid that forms the nucleic acid aptamer may comprise naturally occurring nucleotides, modified nucleotides, naturally occurring nucleotides with hydrocarbon linkers (e.g., an alkylene) or a polyether linker (e.g., a PEG linker) inserted between one or more nucleotides, modified nucleotides with hydrocarbon or PEG linkers inserted between one or more nucleotides, or a combination of thereof. Exemplary publications and patents describing aptamers and method of producing aptamers include, e.g., Lorsch and Szostak, 1996; Jayasena, 1999; U.S. Pat. Nos. 5,270,163; 5,567,588; 5,650,275; 5,670,637; 5,683,867; 5,696,249; 5,789,157; 5,843,653; 5,864,026; 5,989,823; 6,569,630; 8,318,438 and PCT application WO 99/31275, each incorporated herein by reference.

[0635] m. Ribozymes

[0636] In some embodiments, oligonucleotides provided herein may be in the form of a ribozyme. A ribozyme (ribonucleic acid enzyme) is a molecule, typically an RNA molecule, that is capable of performing specific biochemical reactions, similar to the action of protein enzymes. Ribozymes are molecules with catalytic activities including the ability to cleave at specific phosphodiester linkages in RNA molecules to which they have hybridized, such as mRNAs, RNA-containing substrates, lncRNAs, and ribozymes, themselves.

[0637] Ribozymes may assume one of several physical structures, one of which is called a “hammerhead.” A hammerhead ribozyme is composed of a catalytic core containing nine conserved bases, a double-stranded stem and loop structure (stem-loop II), and two regions complementary to the target RNA flanking regions the catalytic core. The flanking regions enable the ribozyme to bind to the target RNA specifically by forming double-stranded stems I and III. Cleavage occurs in cis (i.e., cleavage of the same RNA molecule that contains the hammerhead motif) or in trans (cleavage of an RNA substrate other than that containing the ribozyme) next to a specific ribonucleotide triplet by a transesterification reaction from a 3′, 5′-phosphate diester to a 2′, 3′-cyclic phosphate diester. Without wishing to be bound by theory, it is believed that this catalytic activity requires the presence of specific, highly conserved sequences in the catalytic region of the ribozyme.

[0638] Modifications in ribozyme structure have also included the substitution or replacement of various non-core portions of the molecule with non-nucleotidic molecules. For example, Benseler et al. (J. Am. Chem. Soc. (1993) 115:8483-8484) disclosed hammerhead-like molecules in which two of the base pairs of stem II, and all four of the nucleotides of loop II were replaced with non-nucleoside linkers based on hexaethylene glycol, propanediol, bis(triethylene glycol) phosphate, tris(propanediol)bisphosphate, or bis(propanediol) phosphate. Ma et al. (Biochem. (1993) 32:1751-1758; Nucleic Acids Res. (1993) 21:2585-2589) replaced the six nucleotide loop of the TAR ribozyme hairpin with non-nucleotidic, ethylene glycol-related linkers. Thomson et al. (Nucleic Acids Res. (1993) 21:5600-5603) replaced loop II with linear, non-nucleotidic linkers of 13, 17, and 19 atoms in length.

[0639] Ribozyme oligonucleotides can be prepared using well known methods (see, e.g., PCT Publications WO9118624; WO9413688; WO9201806; and WO 92/07065; and U.S. Pat. No. 5,436,143 and 5,650,502) or can be purchased from commercial sources (e.g., US Biochemicals) and, if desired, can incorporate nucleotide analogs to increase the resistance of the oligonucleotide to degradation by nucleases in a cell. The ribozyme may be synthesized in any known manner, e.g., by use of a commercially available synthesizer produced, e.g., by Applied Biosystems, Inc. or Milligen. The ribozyme may also be produced in recombinant vectors by conventional means. See, Molecular Cloning: A Laboratory Manual, Cold Spring Harbor Laboratory (Current edition). The ribozyme RNA sequences maybe synthesized conventionally, for example, by using RNA polymerases such as T7 or SP6.

[0640] n. Guide Nucleic Acids

[0641] In some embodiments, oligonucleotides are guide nucleic acid, e.g., guide RNA (gRNA) molecules. Generally, a guide RNA is a short synthetic RNA composed of (1) a scaffold sequence that binds to a nucleic acid programmable DNA binding protein (napDNAbp), such as Cas9, and (2) a nucleotide spacer portion that defines the DNA target sequence (e.g., genomic DNA target) to which the gRNA binds in order to bring the nucleic acid programmable DNA binding protein in proximity to the DNA target sequence. In some embodiments, the napDNAbp is a nucleic acid-programmable protein that forms a complex with (e.g., binds or associates with) one or more RNA(s) that targets the nucleic acid-programmable protein to a target DNA sequence (e.g., a target genomic DNA sequence). In some embodiments, a nucleic acid-programmable nuclease, when in a complex with an RNA, may be referred to as a nuclease:RNA complex. Guide RNAs can exist as a complex of two or more RNAs, or as a single RNA molecule.

[0642] Guide RNAs (gRNAs) that exist as a single RNA molecule may be referred to as single-guide RNAs (sgRNAs), though gRNA is also used to refer to guide RNAs that exist as either single molecules or as a complex of two or more molecules. Typically, gRNAs that exist as a single RNA species comprise two domains: (1) a domain that shares homology to a target nucleic acid (i.e., directs binding of a Cas9 complex to the target); and (2) a domain that binds a Cas9 protein. In some embodiments, domain (2) corresponds to a sequence known as a tracrRNA and comprises a stem-loop structure. In some embodiments, domain (2) is identical or homologous to a tracrRNA as provided in Jinek et al., Science 337:816-821 (2012), the entire contents of which is incorporated herein by reference.

[0643] In some embodiments, a gRNA comprises two or more of domains (1) and (2), and may be referred to as an extended gRNA. For example, an extended gRNA will bind two or more Cas9 proteins and bind a target nucleic acid at two or more distinct regions, as described herein. The gRNA comprises a nucleotide sequence that complements a target site, which mediates binding of the nuclease/RNA complex to said target site, providing the sequence specificity of the nuclease:RNA complex. In some embodiments, the RNA-programmable nuclease is the (CRISPR-associated system) Cas9 endonuclease, for example, Cas9 (Csn1) from Streptococcus pyogenes (see, e.g., “Complete genome sequence of an M1 strain of Streptococcus pyogenes.” Ferretti J. J., McShan W. M., Ajdic D. J., Savic D. J., Savic G., Lyon K., Primeaux C., Sezate S., Suvorov A. N., Kenton S., Lai H. S., Lin S. P., Qian Y., Jia H. G., Najar F. Z., Ren Q., Zhu H., Song L., White J., Yuan X., Clifton S. W., Roe B. A., McLaughlin R. E., Proc. Natl. Acad. Sci. U.S.A. 98:4658-4663 (2001); “CRISPR RNA maturation by trans-encoded small RNA and host factor RNase III.” Deltcheva E., Chylinski K., Sharma C. M., Gonzales K., Chao Y., Pirzada Z. A., Eckert M. R., Vogel J., Charpentier E., Nature 471:602-607 (2011); and “A programmable dual-RNA-guided DNA endonuclease in adaptive bacterial immunity.” Jinek M., Chylinski K., Fonfara I., Hauer M., Doudna J. A., Charpentier E. Science 337:816-821 (2012), the entire contents of each of which are incorporated herein by reference.

[0644] o. Multimers

[0645] In some embodiments, molecular payloads may comprise multimers (e.g., concatemers) of 2 or more oligonucleotides connected by a linker. In this way, in some embodiments, the oligonucleotide loading of a complex/conjugate can be increased beyond the available linking sites on a targeting agent (e.g., available thiol sites on an antibody) or otherwise tuned to achieve a particular payload loading content. Oligonucleotides in a multimer can be the same or different (e.g., targeting different genes or different sites on the same gene or products thereof).

[0646] In some embodiments, multimers comprise 2 or more oligonucleotides linked together by a cleavable linker. However, in some embodiments, multimers comprise 2 or more oligonucleotides linked together by a non-cleavable linker. In some embodiments, a multimer comprises 2, 3, 4, 5, 6, 7, 8, 9, 10 or more oligonucleotides linked together. In some embodiments, a multimer comprises 2 to 5, 2 to 10 or 4 to 20 oligonucleotides linked together.

[0647] In some embodiments, a multimer comprises 2 or more oligonucleotides linked end-to-end (in a linear arrangement). In some embodiments, a multimer comprises 2 or more oligonucleotides linked end-to-end via a oligonucleotide based linker (e.g., poly-dT linker, an abasic linker). In some embodiments, a multimer comprises a 5′ end of one oligonucleotide linked to a 3′ end of another oligonucleotide. In some embodiments, a multimer comprises a 3′ end of one oligonucleotide linked to a 3′ end of another oligonucleotide. In some embodiments, a multimer comprises a 5′ end of one oligonucleotide linked to a 5′ end of another oligonucleotide. Still, in some embodiments, multimers can comprise a branched structure comprising multiple oligonucleotides linked together by a branching linker.

[0648] Further examples of multimers that may be used in the complexes provided herein are disclosed, for example, in US Patent Application Number 2015/0315588 A1, entitled Methods of delivering multiple targeting oligonucleotides to a cell using cleavable linkers, which was published on Nov. 5, 2015; US Patent Application Number 2015/0247141 A1, entitled Multimeric Oligonucleotide Compounds, which was published on Sep. 3, 2015, US Patent Application Number US 2011/0158937 A1, entitled Immunostimulatory Oligonucleotide Multimers, which was published on Jun. 30, 2011; and U.S. Pat. No. 5,693,773, entitled Triplex-Forming Antisense Oligonucleotides Having Abasic Linkers Targeting Nucleic Acids Comprising Mixed Sequences Of Purines And Pyrimidines, which issued on Dec. 2, 1997, the contents of each of which are incorporated herein by reference in their entireties.

[0649] ii. Small Molecules:

[0650] Any suitable small molecule may be used as a molecular payload, as described herein. In some embodiments, the small molecule is as described in US Patent Application Publication 2016052914A1, published on Feb. 25, 2016, entitled “Compounds And Methods For Myotonic Dystrophy Therapy”. Further examples of small molecule payloads are provided in Lopez-Morato M, et al., Small Molecules Which Improve Pathogenesis of Myotonic Dystrophy Type 1, (Review) Front. Neurol., 18 May 2018. For example, in some embodiments, the small molecule is an MBNL1 upregulator such as phenylbuthazone, ketoprofen, ISOX, or vorinostat. In some embodiments, the small molecule is an H-Ras pathway inhibitor such as manumycin A. In some embodiments, the small molecule is a protein kinase modulator such as Ro-318220, C16, C51, Metformin, AICAR, lithium chloride, TDZD-8 or Bio. In some embodiments, the small molecule is a plant alkaloid such as harmine. In some embodiments, the small molecule is a transcription inhibitor such as pentamidine, propamidine, heptamidiine or actinomycin D. In some embodiments, the small molecule is an inhibitor of Glycogen synthase kinase 3 beta (GSK3B), for example, as disclosed in Jones K, et al., GSK3β mediates muscle pathology in myotonic dystrophy. J Clin Invest. 2012 December; 122(12):4461-72; and Wei C, et al., GSK3β is a new therapeutic target for myotonic dystrophy type 1. Rare Dis. 2013; 1: e26555; and Palomo V, et al., Subtly Modulating Glycogen Synthase Kinase 3 (3: Allosteric Inhibitor Development and Their Potential for the Treatment of Chronic Diseases. J Med Chem. 2017 Jun. 22; 60(12):4983-5001, the contents of each of which are incorporated herein by reference in their entireties. In some embodiments, the small molecule is a substituted pyrido[2,3-d]pyrimidines and pentamidine-like compound, as disclosed in Gonzalez A L, et al., In silico discovery of substituted pyrido[2,3-d]pyrimidines and pentamidine-like compounds with biological activity in myotonic dystrophy models. PLoS One. 2017 Jun. 5; 12(6):e0178931, the contents of which are incorporated herein by reference in its entirety. In some embodiments, the small molecule is an MBNL1 modulator, for example, as disclosed in: Zhange F, et al., A flow cytometry-based screen identifies MBNL1 modulators that rescue splicing defects in myotonic dystrophy type I. Hum Mol Genet. 2017 Aug. 15; 26(16):3056-3068, the contents of which are incorporated herein by reference in its entirety.

[0651] iii. Peptides

[0652] Any suitable peptide or protein may be used as a molecular payload, as described herein. A peptide or protein payload may correspond to a sequence of a protein that preferentially binds to a nucleic acid, e.g. a disease-associated repeat, or a protein, e.g. MBNL1, found in muscle cells. In some embodiments, peptides or proteins may be produced, synthesized, and/or (e.g., and) derivatized using several methodologies, e.g. phage displayed peptide libraries, one-bead one-compound peptide libraries, or positional scanning synthetic peptide combinatorial libraries. Exemplary methodologies have been characterized in the art and are incorporated by reference (Gray, B. P. and Brown, K. C. “Combinatorial Peptide Libraries: Mining for Cell-Binding Peptides” Chem Rev. 2014, 114:2, 1020-1081.; Samoylova, T. I. and Smith, B. F. “Elucidation of muscle-binding peptides by phage display screening.” Muscle Nerve, 1999, 22:4. 460-6.).

[0653] In some embodiments, the peptide is as described in US Patent Application 2018/0021449, published on Jan. 25, 2018, “Antisense conjugates for decreasing expression of DMPK”. In some embodiments, the peptide is as described in Garcia-Lopez et al., “In vivo discovery of a peptide that prevents CUG-RNA hairpin formation and reverses RNA toxicity in myotonic dystrophy models”, PNAS Jul. 19, 2011. 108 (29) 11866-11871. In some embodiments, the peptide or protein may target, e.g., bind to, a disease-associated repeat, e.g. a RNA CUG repeat expansion.

[0654] In some embodiments, the peptide or protein comprises a fragment of an MBNL protein, e.g., MBNL1. In some embodiments, the peptide or protein comprises at least one zinc finger. In some embodiments, the peptide or protein may comprise about 2-25 amino acids, about 2-20 amino acids, about 2-15 amino acids, about 2-10 amino acids, or about 2-5 amino acids. The peptide or protein may comprise naturally-occurring amino acids, e.g. cysteine, alanine, or non-naturally-occurring or modified amino acids. Non-naturally occurring amino acids include β-amino acids, homo-amino acids, proline derivatives, 3-substituted alanine derivatives, linear core amino acids, N-methyl amino acids, and others known in the art. In some embodiments, the peptide may be linear; in other embodiments, the peptide may be cyclic, e.g. bicyclic.

[0655] iv. Nucleic Acid Constructs

[0656] Any suitable gene expression construct may be used as a molecular payload, as described herein. In some embodiments, a gene expression construct may be a vector or a cDNA fragment. In some embodiments, a gene expression construct may be messenger RNA (mRNA). In some embodiments, a mRNA used herein may be a modified mRNA, e.g., as described in U.S. Pat. No. 8,710,200, issued on Apr. 24, 2014, entitled “Engineered nucleic acids encoding a modified erythropoietin and their expression”. In some embodiments, a mRNA may comprise a 5′ methyl cap. In some embodiments, a mRNA may comprise a polyA tail, optionally of up to 160 nucleotides in length. A gene expression construct may encode a sequence of a protein that preferentially binds to a nucleic acid, e.g. a disease-associated repeat, or a protein, e.g. MBNL1, found in muscle cells. In some embodiments, the gene expression construct may be expressed, e.g., overexpressed, within the nucleus of a muscle cell. In some embodiments, the gene expression construct encodes a MBNL protein, e.g., MBNL1. In some embodiments, the gene expression constructs encodes a protein that comprises at least one zinc finger. In some embodiments, the gene expression construct encodes a protein that binds to a disease-associated repeat. In some embodiments, the gene expression construct encodes a protein that leads to a reduction in the expression of a disease-associated repeat. In some embodiments, the gene expression construct encodes a gene editing enzyme. Additional examples of nucleic acid constructs that may be used as molecular payloads are provided in International Patent Application Publication WO2017152149A1, published on Sep. 19, 2017, entitled, “Closed-Ended Linear Duplex Dna For Non-Viral Gene Transfer”; U.S. Pat. No. 8,853,377B2, issued on Oct. 7, 2014, entitled, “mRNA For Use In Treatment Of Human Genetic Diseases”; and U.S. Pat. No. 8,822,663B2, issued on Sep. 2, 2014, Engineered Nucleic Acids And Methods Of Use Thereof,” the contents of each of which are incorporated herein by reference in their entireties.

[0657] Further examples of complexes and molecular payloads (e.g., oligonucleotides useful for targeting muscle genes) are provided in International Patent Application Publication WO2020/028861, published on Feb. 6, 2020, entitled, “MUSCLE TARGETING COMPLEXES AND USES THEREOF FOR TREATING MYOTONIC DYSTROPHY”; and International Patent Application Publication WO2020/028857, published on Feb. 6, 2020, entitled, “MUSCLE-TARGETING COMPLEXES AND USES THEREOF”, the contents of each of which are incorporated herein by reference.

[0658] C. Linkers

[0659] Complexes described herein generally comprise a linker that connects a muscle-targeting agent to a molecular payload. A linker comprises at least one covalent bond. In some embodiments, a linker may be a single bond, e.g., a disulfide bond or disulfide bridge, that connects a muscle-targeting agent to a molecular payload. However, in some embodiments, a linker may connect a muscle-targeting agent to a molecular payload through multiple covalent bonds. In some embodiments, a linker may be a cleavable linker. However, in some embodiments, a linker may be a non-cleavable linker. A linker is generally stable in vitro and in vivo, and may be stable in certain cellular environments. Additionally, generally a linker does not negatively impact the functional properties of either the muscle-targeting agent or the molecular payload. Examples and methods of synthesis of linkers are known in the art (see, e.g. Kline, T. et al. “Methods to Make Homogenous Antibody Drug Conjugates.” Pharmaceutical Research, 2015, 32:11, 3480-3493.; Jain, N. et al. “Current ADC Linker Chemistry” Pharm Res. 2015, 32:11, 3526-3540.; McCombs, J. R. and Owen, S. C. “Antibody Drug Conjugates: Design and Selection of Linker, Payload and Conjugation Chemistry” AAPS J. 2015, 17:2, 339-351.).

[0660] A precursor to a linker typically will contain two different reactive species that allow for attachment to both the muscle-targeting agent and a molecular payload. In some embodiments, the two different reactive species may be a nucleophile and/or (e.g., and) an electrophile. In some embodiments, a linker is connected to a muscle-targeting agent via conjugation to a lysine residue or a cysteine residue of the muscle-targeting agent. In some embodiments, a linker is connected to a cysteine residue of a muscle-targeting agent via a maleimide-containing linker, wherein optionally the maleimide-containing linker comprises a maleimidocaproyl or maleimidomethyl cyclohexane-1-carboxylate group. In some embodiments, a linker is connected to a cysteine residue of a muscle-targeting agent or thiol functionalized molecular payload via a 3-arylpropionitrile functional group. In some embodiments, a linker is connected to a lysine residue of an anti-TfR antibody. In some embodiments, a linker is connected to a muscle-targeting agent and/or (e.g., and) a molecular payload via an amide bond, a carbamate bond, a hydrazide, a triazole, a thioether or a disulfide bond.

[0661] i. Cleavable Linkers

[0662] A cleavable linker may be a protease-sensitive linker, a pH-sensitive linker, or a glutathione-sensitive linker. These linkers are generally cleavable only intracellularly and are preferably stable in extracellular environments, e.g. extracellular to a muscle cell.

[0663] Protease-sensitive linkers are cleavable by protease enzymatic activity. These linkers typically comprise peptide sequences and may be 2-10 amino acids, about 2-5 amino acids, about 5-10 amino acids, about 10 amino acids, about 5 amino acids, about 3 amino acids, or about 2 amino acids in length. In some embodiments, a peptide sequence may comprise naturally-occurring amino acids, e.g. cysteine, alanine, or non-naturally-occurring or modified amino acids. Non-naturally occurring amino acids include β-amino acids, homo-amino acids, proline derivatives, 3-substituted alanine derivatives, linear core amino acids, N-methyl amino acids, and others known in the art. In some embodiments, a protease-sensitive linker comprises a valine-citrulline or alanine-citrulline dipeptide sequence. In some embodiments, a protease-sensitive linker can be cleaved by a lysosomal protease, e.g. cathepsin B, and/or (e.g., and) an endosomal protease.

[0664] A pH-sensitive linker is a covalent linkage that readily degrades in high or low pH environments. In some embodiments, a pH-sensitive linker may be cleaved at a pH in a range of 4 to 6. In some embodiments, a pH-sensitive linker comprises a hydrazone or cyclic acetal. In some embodiments, a pH-sensitive linker is cleaved within an endosome or a lysosome.

[0665] In some embodiments, a glutathione-sensitive linker comprises a disulfide moiety. In some embodiments, a glutathione-sensitive linker is cleaved by an disulfide exchange reaction with a glutathione species inside a cell. In some embodiments, the disulfide moiety further comprises at least one amino acid, e.g. a cysteine residue.

[0666] In some embodiments, the linker is a Val-cit linker (e.g., as described in U.S. Pat. No. 6,214,345, incorporated herein by reference). In some embodiments, before conjugation, the val-cit linker has a structure of:

[chemical structure]

[0667] In some embodiments, after conjugation, the val-cit linker has a structure of:

[chemical structure]

[0668] In some embodiments, the Val-cit linker is attached to a reactive chemical moiety (e.g., SPAAC for click chemistry conjugation). In some embodiments, before click chemistry conjugation, the val-cit linker attached to a reactive chemical moiety (e.g., SPAAC for click chemistry conjugation) has the structure of:

[chemical structure]

wherein n is any number from 0-10. In some embodiments, n is 3.

[0669] In some embodiments, the val-cit linker attached to a reactive chemical moiety (e.g., SPAAC for click chemistry conjugation) is conjugated (e.g., via a different chemical moiety) to a molecular payload (e.g., an oligonucleotide). In some embodiments, the val-cit linker attached to a reactive chemical moiety (e.g., SPAAC for click chemistry conjugation) and is conjugated to a molecular payload (e.g., an oligonucleotide) has the structure of (before click chemistry conjugation):

[chemical structure]

wherein n is any number from 0-10. In some embodiments, n is 3.

[0670] In some embodiments, after conjugation to a molecular payload (e.g., an oligonucleotide) and, the val-cit linker has a structure of:

[chemical structure]

wherein n is any number from 0-10, and wherein m is any number from 0-10. In some embodiments, n is 3 and m is 4.

[0671] ii. Non-Cleavable Linkers

[0672] In some embodiments, non-cleavable linkers may be used. Generally, a non-cleavable linker cannot be readily degraded in a cellular or physiological environment. In some embodiments, a non-cleavable linker comprises an optionally substituted alkyl group, wherein the substitutions may include halogens, hydroxyl groups, oxygen species, and other common substitutions. In some embodiments, a linker may comprise an optionally substituted alkyl, an optionally substituted alkylene, an optionally substituted arylene, a heteroarylene, a peptide sequence comprising at least one non-natural amino acid, a truncated glycan, a sugar or sugars that cannot be enzymatically degraded, an azide, an alkyne-azide, a peptide sequence comprising a LPXTG sequence (SEQ ID NO: 733), a thioether, a biotin, a biphenyl, repeating units of polyethylene glycol or equivalent compounds, acid esters, acid amides, sulfamides, and/or (e.g., and) an alkoxy-amine linker. In some embodiments, sortase-mediated ligation will be utilized to covalently link a muscle-targeting agent comprising a LPXTG sequence (SEQ ID NO: 733) to a molecular payload comprising a (G)ₙ sequence (see, e.g. Proft T. Sortase-mediated protein ligation: an emerging biotechnology tool for protein modification and immobilization. Biotechnol Lett. 2010, 32(1):1-10.). In some embodiments, a linker comprises a LPXTG sequence (SEQ ID NO: 733), where X is any amino acid.

[0673] In some embodiments, a linker may comprise a substituted alkylene, an optionally substituted alkenylene, an optionally substituted alkynylene, an optionally substituted cycloalkylene, an optionally substituted cycloalkenylene, an optionally substituted arylene, an optionally substituted heteroarylene further comprising at least one heteroatom selected from N, O, and S; an optionally substituted heterocyclylene further comprising at least one heteroatom selected from N, O, and S; an imino, an optionally substituted nitrogen species, an optionally substituted oxygen species O, an optionally substituted sulfur species, or a poly(alkylene oxide), e.g. polyethylene oxide or polypropylene oxide.

[0674] iii. Linker Conjugation

[0675] In some embodiments, a linker is connected to a muscle-targeting agent and/or (e.g., and) molecular payload via a phosphate, thioether, ether, carbon-carbon, a carbamate, or amide bond. In some embodiments, a linker is connected to an oligonucleotide through a phosphate or phosphorothioate group, e.g. a terminal phosphate of an oligonucleotide backbone. In some embodiments, a linker is connected to an muscle-targeting agent, e.g. an antibody, through a lysine or cysteine residue present on the muscle-targeting agent

[0676] In some embodiments, a linker is connected to a muscle-targeting agent and/or (e.g., and) molecular payload by a cycloaddition reaction between an azide and an alkyne to form a triazole, wherein the azide and the alkyne may be located on the muscle-targeting agent, molecular payload, or the linker. In some embodiments, an alkyne may be a cyclic alkyne, e.g., a cyclooctyne. In some embodiments, an alkyne may be bicyclononyne (also known as bicyclo[6.1.0]nonyne or BCN) or substituted bicyclononyne. In some embodiments, a cyclooctane is as described in International Patent Application Publication WO2011136645, published on Nov. 3, 2011, entitled, “Fused Cyclooctyne Compounds And Their Use In Metal free Click Reactions”. In some embodiments, an azide may be a sugar or carbohydrate molecule that comprises an azide. In some embodiments, an azide may be 6-azido-6-deoxygalactose or 6-azido-N-acetylgalactosamine. In some embodiments, a sugar or carbohydrate molecule that comprises an azide is as described in International Patent Application Publication WO2016170186, published on Oct. 27, 2016, entitled, “Process For The Modification Of A Glycoprotein Using A Glycosyltransferase That Is Or Is Derived From A β(1,4)-N-Acetylgalactosaminyltransferase”. In some embodiments, a cycloaddition reaction between an azide and an alkyne to form a triazole, wherein the azide and the alkyne may be located on the muscle-targeting agent, molecular payload, or the linker is as described in International Patent Application Publication WO2014065661, published on May 1, 2014, entitled, “Modified antibody, antibody-conjugate and process for the preparation thereof”; or International Patent Application Publication WO2016170186, published on Oct. 27, 2016, entitled, “Process For The Modification Of A Glycoprotein Using A Glycosyltransferase That Is Or Is Derived From A β(1,4)-N-Acetylgalactosaminyltransferase”.

[0677] In some embodiments, a linker further comprises a spacer, e.g., a polyethylene glycol spacer or an acyl/carbomoyl sulfamide spacer, e.g., a HydraSpace™ spacer. In some embodiments, a spacer is as described in Verkade, J. M. M. et al., “A Polar Sulfamide Spacer Significantly Enhances the Manufacturability, Stability, and Therapeutic Index of Antibody-Drug Conjugates”, Antibodies, 2018, 7, 12.

[0678] In some embodiments, a linker is connected to a muscle-targeting agent and/or (e.g., and) molecular payload by the Diels-Alder reaction between a dienophile and a diene/hetero-diene, wherein the dienophile and the diene/hetero-diene may be located on the muscle-targeting agent, molecular payload, or the linker. In some embodiments a linker is connected to a muscle-targeting agent and/or (e.g., and) molecular payload by other pericyclic reactions, e.g. ene reaction. In some embodiments, a linker is connected to a muscle-targeting agent and/or (e.g., and) molecular payload by an amide, thioamide, or sulfonamide bond reaction. In some embodiments, a linker is connected to a muscle-targeting agent and/or (e.g., and) molecular payload by a condensation reaction to form an oxime, hydrazone, or semicarbazide group existing between the linker and the muscle-targeting agent and/or (e.g., and) molecular payload.

[0679] In some embodiments, a linker is connected to a muscle-targeting agent and/or (e.g., and) molecular payload by a conjugate addition reactions between a nucleophile, e.g. an amine or a hydroxyl group, and an electrophile, e.g. a carboxylic acid, carbonate, or an aldehyde. In some embodiments, a nucleophile may exist on a linker and an electrophile may exist on a muscle-targeting agent or molecular payload prior to a reaction between a linker and a muscle-targeting agent or molecular payload. In some embodiments, an electrophile may exist on a linker and a nucleophile may exist on a muscle-targeting agent or molecular payload prior to a reaction between a linker and a muscle-targeting agent or molecular payload. In some embodiments, an electrophile may be an azide, a pentafluorophenyl, a silicon centers, a carbonyl, a carboxylic acid, an anhydride, an isocyanate, a thioisocyanate, a succinimidyl ester, a sulfosuccinimidyl ester, a maleimide, an alkyl halide, an alkyl pseudohalide, an epoxide, an episulfide, an aziridine, an aryl, an activated phosphorus center, and/or (e.g., and) an activated sulfur center. In some embodiments, a nucleophile may be an optionally substituted alkene, an optionally substituted alkyne, an optionally substituted aryl, an optionally substituted heterocyclyl, a hydroxyl group, an amino group, an alkylamino group, an anilido group, or a thiol group.

[0680] In some embodiments, the val-cit linker attached to a reactive chemical moiety (e.g., SPAAC for click chemistry conjugation) is conjugated to the anti-TfR antibody by a structure of:

[chemical structure]

wherein m is any number from 0-10. In some embodiments, m is 4.

[0681] In some embodiments, the val-cit linker attached to a reactive chemical moiety (e.g., SPAAC for click chemistry conjugation) is conjugated to an anti-TfR antibody having a structure of:

[chemical structure]

wherein m is any number from 0-10. In some embodiments, m is 4.

[0682] In some embodiments, the val-cit linker attached to a reactive chemical moiety (e.g., SPAAC for click chemistry conjugation) and is conjugated to an anti-TfR antibody has a structure of:

[chemical structure]

wherein n is any number from 0-10, wherein m is any number from 0-10. In some embodiments, n is 3 and/or (e.g., and) m is 4.

[0683] In some embodiments, an anti-TfR antibody and a molecular payload (e.g., an oligonucleotide) is linked via a structure of:

[chemical structure]

wherein n is any number from 0-10, wherein m is any number from 0-10. In some embodiments, n is 3 and/or (e.g., and) m is 4. In some embodiments, X is NH (e.g., NH from an amine group of a lysine). In some embodiments, X is S and the antibody is linked via conjugation to a cysteine of the antibody. In some embodiments, X is O and the antibody is linked via conjugation to a hydroxyl group of a serine, threonine, or tyrosine of the antibody.

[0684] In some embodiments, the complex described herein has a structure of:

[chemical structure]

wherein n is any number from 0-10, wherein m is any number from 0-10. In some embodiments, n is 3 and/or (e.g., and) m is 4.

[0685] In structures formula (A), (B), (C), and (D), L1 is, in some embodiments, a spacer that is substituted or unsubstituted aliphatic, substituted or unsubstituted heteroaliphatic, substituted or unsubstituted carbocyclylene, substituted or unsubstituted heterocyclylene, substituted or unsubstituted arylene, substituted or unsubstituted heteroarylene, —O—, —N(R^{A})—, —S—, —C(═O)—, —C(═O)O—, —C(═O)NR^{A}—, —NR^{A}C(═O)—, —NR^{A}C(═O)R^{A}—, —C(═O)R^{A}—, —NR^{A}C(═O)O—, —NR^{A}C(═O)N(R^{A})—, —OC(═O)—, —OC(═O)O—, —OC(═O)N(R^{A})—, —S(O)₂NR^{A}—, —NR^{A}S(O)₂—, or a combination thereof, wherein each R^{A} is independently hydrogen or substituted or unsubstituted alkyl. In some embodiments, L1 is

[chemical structure]

wherein the piperazine moiety links to the oligonucleotide, wherein L2 is

[chemical structure]

[0686] In some embodiments, L1 is:

[chemical structure]

wherein the piperazine links to the oligonucleotide.

[0687] In some embodiments, L1 is linked to the 5′ phosphate of the oligonucleotide. In some embodiments, L1 is linked to the 5′ phosphorothioate of the oligonucleotide. In some embodiments, L1 is linked to the 5′ phosphonoamidate of the oligonucleotide.

[0688] In some embodiments, L1 is optional (e.g., need not be present).

[0689] D. Examples of Antibody-Molecular Payload Complexes

[0690] Other aspects of the present disclosure provide complexes comprising any one the muscle targeting agent (e.g., a transferrin receptor antibodies) described herein covalently linked to any of the molecular payloads (e.g., an oligonucleotide) described herein. In some embodiments, the muscle targeting agent (e.g., a transferrin receptor antibody) is covalently linked to a molecular payload (e.g., an oligonucleotide) via a linker. Any of the linkers described herein may be used. In some embodiments, the linker is linked to the 5′ end, the 3′ end, or internally of the oligonucleotide. In some embodiments, the linker is linked to the antibody via a thiol-reactive linkage (e.g., via a cysteine in the antibody). In some embodiments, the linker (e.g., a Val-cit linker) is linked to the antibody (e.g., an anti-TfR antibody described herein) via a n amine group (e.g., via a lysine in the antibody).

[0691] An example of a structure of a complex comprising a transferrin receptor antibody covalently linked to an oligonucleotide via a Val-cit linker is provided below:

[chemical structure]

wherein the linker is linked to the 5′ end, the 3′ end, or internally of the oligonucleotide, and wherein the linker is linked to the antibody via a thiol-reactive linkage (e.g., via a cysteine in the antibody).

[0692] Another example of a structure of a complex comprising an anti-TfR antibody covalently linked to a molecular payload via a Val-cit linker is provided below:

[chemical structure]

wherein n is a number between 0-10, wherein m is a number between 0-10, wherein the linker is linked to the antibody via an amine group (e.g., on a lysine residue), and/or (e.g., and) wherein the linker is linked to the oligonucleotide (e.g., at the 5′ end, 3′ end, or internally). In some embodiments, the linker is linked to the antibody via a lysine, the linker is linked to the oligonucleotide at the 5′ end, n is 3, and m is 4. In some embodiments, the molecular payload is a DMPK-targeting oligonucleotide (e.g., a DMPK-targeting oligonucleotide listed in Table 10 and Table 16, or a DMPK targeting oligonucleotide targeting a target sequence listed in Table 10).

[0693] In some embodiments, L1 is

[chemical structure]

[0694] It should be appreciated that antibodies can be linked to oligonucleotides with different stoichiometries, a property that may be referred to as a drug to antibody ratios (DAR) with the “drug” being the oligonucleotide. In some embodiments, one oligonucleotide is linked to an antibody (DAR=1). In some embodiments, two oligonucleotides are linked to an antibody (DAR=2). In some embodiments, three oligonucleotides are linked to an antibody (DAR=3). In some embodiments, four oligonucleotides are linked to an antibody (DAR=4). In some embodiments, a mixture of different complexes, each having a different DAR, is provided. In some embodiments, an average DAR of complexes in such a mixture may be in a range of 1 to 3, 1 to 4, 1 to 5 or more. DAR may be increased by conjugating oligonucleotides to different sites on an antibody and/or (e.g., and) by conjugating multimers to one or more sites on antibody. For example, a DAR of 2 may be achieved by conjugating a single oligonucleotide to two different sites on an antibody or by conjugating a dimer oligonucleotide to a single site of an antibody.

[0695] In some embodiments, the complex described herein comprises a transferrin receptor antibody (e.g., an antibody or any variant thereof as described herein) covalently linked to an oligonucleotide. In some embodiments, the complex described herein comprises a transferrin receptor antibody (e.g., an antibody or any variant thereof as described herein) covalently linked to an oligonucleotide via a linker (e.g., a Val-cit linker). In some embodiments, the linker (e.g., a Val-cit linker) is linked to the 5′ end, the 3′ end, or internally of the oligonucleotide. In some embodiments, the linker (e.g., a Val-cit linker) is linked to the antibody (e.g., an antibody or any variant thereof as described herein) via a thiol-reactive linkage (e.g., via a cysteine in the antibody). In some embodiments, the linker (e.g., a Val-cit linker) is linked to the antibody (e.g., an anti-TfR antibody described herein) via an amine group (e.g., via a lysine in the antibody).

[0696] In some embodiments, in any one of the examples of complexes described herein, the molecular payload is an oligonucleotide comprising a region of complementarity of at least 15 nucleotides to any one of the gene target sequences described herein, optionally wherein the target sequence is a sequence listed in Table 10.

[0697] In some embodiments, the complex described herein comprises an anti-TfR antibody covalently linked to a molecular payload (e.g., an oligonucleotide), wherein the anti-TfR antibody comprises a CDR-H1, a CDR-H2, and a CDR-H3 that are the same as the CDR-H1, CDR-H2, and CDR-H3 shown in Table 2, Table 4, Table 7, or Table 9; and a CDR-L1, a CDR-L2, and a CDR-L3 that are the same as the CDR-L1, CDR-L2, and CDR-L3 shown in Table 2, Table 4, Table 7, or Table 9. In some embodiments, the molecular payload is a DMPK-targeting oligonucleotide (e.g., a DMPK-targeting oligonucleotide listed in Table 10 and Table 16, or a DMPK targeting oligonucleotide targeting a target sequence listed in Table 10).

[0698] In some embodiments, the complex described herein comprises an anti-TfR antibody covalently linked to a molecular payload (e.g., an oligonucleotide), wherein the anti-TfR antibody comprises:

[0699] (i) a CDR-H1 of SEQ ID NO: 1, a CDR-H2 of SEQ ID NO: 2, SEQ ID NO: 731, or SEQ ID NO: 80, a CDR-H3 of SEQ ID NO: 3, a CDR-L1 of SEQ ID NO: 4, a CDR-L2 of SEQ ID NO: 5, and a CDR-L3 of SEQ ID NO: 6;

[0700] (ii) a CDR-H1 of SEQ ID NO: 145, a CDR-H2 of SEQ ID NO: 146, SEQ ID NO: 732, or SEQ ID NO: 734, a CDR-H3 of SEQ ID NO: 147, a CDR-L1 of SEQ ID NO: 148, a CDR-L2 of SEQ ID NO: 149, and a CDR-L3 of SEQ ID NO: 6; or

[0701] (iii) a CDR-H1 of SEQ ID NO: 150, a CDR-H2 of SEQ ID NO: 151, SEQ ID NO: 739, or SEQ ID NO: 740, a CDR-H3 of SEQ ID NO: 152, a CDR-L1 of SEQ ID NO: 153, a CDR-L2 of SEQ ID NO: 5, and a CDR-L3 of SEQ ID NO: 154. In some embodiments, the molecular payload is a DMPK-targeting oligonucleotide (e.g., a DMPK-targeting oligonucleotide listed in Table 10 and Table 16, or a DMPK targeting oligonucleotide targeting a target sequence listed in Table 10).

[0702] In some embodiments, the complex described herein comprises an anti-TfR antibody covalently linked to a molecular payload (e.g., an oligonucleotide), wherein the anti-TfR antibody comprises:

[0703] (i) a CDR-H1 of SEQ ID NO: 9, a CDR-H2 of SEQ ID NO: 10, a CDR-H3 of SEQ ID NO: 11, a CDR-L1 of SEQ ID NO: 12, a CDR-L2 of SEQ ID NO: 13, and a CDR-L3 of SEQ ID NO: 14;

[0704] (ii) a CDR-H1 of SEQ ID NO: 155, a CDR-H2 of SEQ ID NO: 156, a CDR-H3 of SEQ ID NO: 157, a CDR-L1 of SEQ ID NO: 158, a CDR-L2 of SEQ ID NO: 159, and a CDR-L3 of SEQ ID NO: 14; or

[0705] (iii) a CDR-H1 of SEQ ID NO: 160, a CDR-H2 of SEQ ID NO: 161, a CDR-H3 of SEQ ID NO: 162, a CDR-L1 of SEQ ID NO: 163, a CDR-L2 of SEQ ID NO: 13, and a CDR-L3 of SEQ ID NO: 164. In some embodiments, the molecular payload is a DMPK-targeting oligonucleotide (e.g., a DMPK-targeting oligonucleotide listed in Table 10 and Table 16, or a DMPK targeting oligonucleotide targeting a target sequence listed in Table 10).

[0706] In some embodiments, the complex described herein comprises an anti-TfR antibody covalently linked to a molecular payload (e.g., an oligonucleotide), wherein the anti-TfR antibody comprises:

[0707] (i) a CDR-H1 of SEQ ID NO: 17, SEQ ID NO: 735, or SEQ ID NO: 737, a CDR-H2 of SEQ ID NO: 18, a CDR-H3 of SEQ ID NO: 19, a CDR-L1 of SEQ ID NO: 20, a CDR-L2 of SEQ ID NO: 21, and a CDR-L3 of SEQ ID NO: 22;

[0708] (ii) a CDR-H1 of SEQ ID NO: 165, SEQ ID NO: 736, or SEQ ID NO: 738, a CDR-H2 of SEQ ID NO: 166, a CDR-H3 of SEQ ID NO: 167, a CDR-L1 of SEQ ID NO: 168, a CDR-L2 of SEQ ID NO: 169, and a CDR-L3 of SEQ ID NO: 22; or

[0709] (iii) a CDR-H1 of SEQ ID NO: 170, a CDR-H2 of SEQ ID NO: 171, a CDR-H3 of SEQ ID NO: 172, a CDR-L1 of SEQ ID NO: 173, a CDR-L2 of SEQ ID NO: 21, and a CDR-L3 of SEQ ID NO: 174. In some embodiments, the molecular payload is a DMPK-targeting oligonucleotide (e.g., a DMPK-targeting oligonucleotide listed in Table 10 and Table 16, or a DMPK targeting oligonucleotide targeting a target sequence listed in Table 10).

[0710] In some embodiments, the complex described herein comprises an anti-TfR antibody covalently linked to a molecular payload (e.g., an oligonucleotide), wherein the anti-TfR antibody comprises:

[0711] (i) a CDR-H1 of SEQ ID NO: 188, a CDR-H2 of SEQ ID NO: 189, a CDR-H3 of SEQ ID NO: 190, a CDR-L1 of SEQ ID NO: 191, a CDR-L2 of SEQ ID NO: 192, and a CDR-L3 of SEQ ID NO: 193;

[0712] (ii) a CDR-H1 of SEQ ID NO: 194, a CDR-H2 of SEQ ID NO: 195, a CDR-H3 of SEQ ID NO: 196, a CDR-L1 of SEQ ID NO: 197, a CDR-L2 of SEQ ID NO: 198, and a CDR-L3 of SEQ ID NO: 193; or

[0713] (iii) a CDR-H1 of SEQ ID NO: 199, a CDR-H2 of SEQ ID NO: 200, a CDR-H3 of SEQ ID NO: 201, a CDR-L1 of SEQ ID NO: 202, a CDR-L2 of SEQ ID NO: 192, and a CDR-L3 of SEQ ID NO: 203. In some embodiments, the molecular payload is a DMPK-targeting oligonucleotide (e.g., a DMPK-targeting oligonucleotide listed in Table 10 and Table 16, or a DMPK targeting oligonucleotide targeting a target sequence listed in Table 10).

[0714] In some embodiments, the complex described herein comprises an anti-TfR antibody covalently linked to a molecular payload (e.g., an oligonucleotide), wherein the anti-TfR antibody comprises VH as shown in Table 2 or Table 7; and a VL as shown in Table 2 or Table 7. In some embodiments, the molecular payload is a DMPK-targeting oligonucleotide (e.g., a DMPK-targeting oligonucleotide listed in Table 10 and Table 16, or a DMPK targeting oligonucleotide targeting a target sequence listed in Table 10).

[0715] In some embodiments, the complex described herein comprises an anti-TfR antibody covalently linked to a molecular payload (e.g., an oligonucleotide), wherein the anti-TfR antibody comprises a VH having the amino acid sequence of SEQ ID NO: 7 and a VL having the amino acid sequence of SEQ ID NO: 8. In some embodiments, the molecular payload is a DMPK-targeting oligonucleotide (e.g., a DMPK-targeting oligonucleotide listed in Table 10 and Table 16, or a DMPK targeting oligonucleotide targeting a target sequence listed in Table 10).

[0716] In some embodiments, the complex described herein comprises an anti-TfR antibody covalently linked to a molecular payload (e.g., an oligonucleotide), wherein the anti-TfR antibody comprises a VH having the amino acid sequence of SEQ ID NO: 15 and a VL having the amino acid sequence of SEQ ID NO: 16. In some embodiments, the molecular payload is a DMPK-targeting oligonucleotide (e.g., a DMPK-targeting oligonucleotide listed in Table 10 and Table 16, or a DMPK targeting oligonucleotide targeting a target sequence listed in Table 10).

[0717] In some embodiments, the complex described herein comprises an anti-TfR antibody covalently linked to a molecular payload (e.g., an oligonucleotide), wherein the anti-TfR antibody comprises a VH having the amino acid sequence of SEQ ID NO: 23 and a VL having the amino acid sequence of SEQ ID NO: 24. In some embodiments, the molecular payload is a DMPK-targeting oligonucleotide (e.g., a DMPK-targeting oligonucleotide listed in Table 10 and Table 16, or a DMPK targeting oligonucleotide targeting a target sequence listed in Table 10).

[0718] In some embodiments, the complex described herein comprises an anti-TfR antibody covalently linked to a molecular payload (e.g., an oligonucleotide), wherein the anti-TfR antibody comprises a VH having the amino acid sequence of SEQ ID NO: 204 and a VL having the amino acid sequence of SEQ ID NO: 205. In some embodiments, the molecular payload is a DMPK-targeting oligonucleotide (e.g., a DMPK-targeting oligonucleotide listed in Table 10 and Table 16, or a DMPK targeting oligonucleotide targeting a target sequence listed in Table 10).

[0719] In some embodiments, the complex described herein comprises an anti-TfR antibody covalently linked to a molecular payload (e.g., an oligonucleotide), wherein the anti-TfR antibody comprises a heavy chain having the amino acid sequence of SEQ ID NO: 178, SEQ ID NO: 185, SEQ ID NO: 769, SEQ ID NO: 770, SEQ ID NO: 773, or SEQ ID NO: 774, and a light chain having the amino acid sequence of SEQ ID NO: 179. In some embodiments, the molecular payload is a DMPK-targeting oligonucleotide (e.g., a DMPK-targeting oligonucleotide listed in Table 10 and Table 16, or a DMPK targeting oligonucleotide targeting a target sequence listed in Table 10).

[0720] In some embodiments, the complex described herein comprises an anti-TfR antibody covalently linked to a molecular payload (e.g., an oligonucleotide) wherein the anti-TfR antibody comprises a heavy chain having the amino acid sequence of SEQ ID NO: 180, SEQ ID NO: 186, and a light chain having the amino acid sequence of SEQ ID NO: 181. In some embodiments, the molecular payload is a DMPK-targeting oligonucleotide (e.g., a DMPK-targeting oligonucleotide listed in Table 10 and Table 16, or a DMPK targeting oligonucleotide targeting a target sequence listed in Table 10).

[0721] In some embodiments, the complex described herein comprises an anti-TfR antibody covalently linked to a molecular payload (e.g., an oligonucleotide), wherein the anti-TfR antibody comprises a heavy chain having the amino acid sequence of SEQ ID NO: 182, SEQ ID NO: 187, SEQ ID NO: 771, SEQ ID NO: 772, SEQ ID NO: 775, or SEQ ID NO: 776, and a light chain having the amino acid sequence of SEQ ID NO: 183. In some embodiments, the molecular payload is a DMPK-targeting oligonucleotide (e.g., a DMPK-targeting oligonucleotide listed in Table 10 and Table 16, or a DMPK targeting oligonucleotide targeting a target sequence listed in Table 10).

[0722] In some embodiments, the complex described herein comprises an anti-TfR antibody covalently linked to a molecular payload (e.g., an oligonucleotide), wherein the anti-TfR antibody comprises a heavy chain having the amino acid sequence of SEQ ID NO: 210, SEQ ID NO: 211, SEQ ID NO: 213, or SEQ ID NO: 777, and a light chain having the amino acid sequence of SEQ ID NO: 212. In some embodiments, the molecular payload is a DMPK-targeting oligonucleotide (e.g., a DMPK-targeting oligonucleotide listed in Table 10 and Table 16, or a DMPK targeting oligonucleotide targeting a target sequence listed in Table 10).

[0723] In some embodiments, the complex described herein comprises an anti-TfR antibody covalently linked to a molecular payload, wherein the antibody is a humanized antibody that comprises a VH that contains human framework regions with the CDR-H1, CDR-H2, and CDR-H3 of a murine antibody listed in Table 2 or Table 4 (e.g., 3A4, 3M12, or 5H12), and a VL that contains human framework regions with the CDR-L1, CDR-L2, and CDR-L3 of a murine antibody listed in Table 2 or Table 4 (e.g., 3A4, 3M12, or 5H12). In some embodiments, the molecular payload is a DMPK-targeting oligonucleotide (e.g., a DMPK-targeting oligonucleotide listed in Table 10 and Table 16, or a DMPK targeting oligonucleotide targeting a target sequence listed in Table 10).

[0724] In some embodiments, the complex described herein comprises an anti-TfR antibody covalently linked to a molecular payload, wherein the antibody comprises a VH that contains human framework regions with the CDR-H1, CDR-H2, and CDR-H3 of a VH as set forth in SEQ ID NO: 7, and a VL that contains human framework regions with the CDR-L1, CDR-L2, and CDR-L3 of a VL as forth in SEQ ID NO: 8. In some embodiments, the molecular payload is a DMPK-targeting oligonucleotide (e.g., a DMPK-targeting oligonucleotide listed in Table 10 and Table 16, or a DMPK targeting oligonucleotide targeting a target sequence listed in Table 10). In some embodiments, the molecular payload is a DMPK-targeting oligonucleotide (e.g., a DMPK-targeting oligonucleotide listed in Table 10 and Table 16, or a DMPK targeting oligonucleotide targeting a target sequence listed in Table 10).

[0725] In some embodiments, the complex described herein comprises an anti-TfR antibody covalently linked to a molecular payload, wherein the antibody comprises a VH that contains human framework regions with the CDR-H1, CDR-H2, and CDR-H3 of a VH as set forth in SEQ ID NO: 15, and a VL that contains human framework regions with the CDR-L1, CDR-L2, and CDR-L3 of a VL as forth in SEQ ID NO: 16. In some embodiments, the molecular payload is a DMPK-targeting oligonucleotide (e.g., a DMPK-targeting oligonucleotide listed in Table 10 and Table 16, or a DMPK targeting oligonucleotide targeting a target sequence listed in Table 10).

[0726] In some embodiments, the complex described herein comprises an anti-TfR antibody covalently linked to a molecular payload, wherein the antibody comprises a VH that contains human framework regions with the CDR-H1, CDR-H2, and CDR-H3 of a VH as set forth in SEQ ID NO: 23, and a VL that contains human framework regions with the CDR-L1, CDR-L2, and CDR-L3 of a VL as forth in SEQ ID NO: 24. In some embodiments, the molecular payload is a DMPK-targeting oligonucleotide (e.g., a DMPK-targeting oligonucleotide listed in Table 10 and Table 16, or a DMPK targeting oligonucleotide targeting a target sequence listed in Table 10).

[0727] In some embodiments, the complex described herein comprises an anti-TfR antibody covalently linked to a molecular payload, wherein the antibody is an IgG1 kappa that comprises human framework regions with the CDRs of a murine antibody listed in Table 2 or Table 4 (e.g., 3A4, 3M12, or 5H12). In some embodiments, the molecular payload is a DMPK-targeting oligonucleotide (e.g., a DMPK-targeting oligonucleotide listed in Table 10 and Table 16, or a DMPK targeting oligonucleotide targeting a target sequence listed in Table 10).

[0728] In some embodiments, the complex described herein comprises an anti-TfR antibody covalently linked to a molecular payload, wherein the antibody is a Fab′ fragment of an IgG1 kappa that comprises human framework regions with the CDRs of a murine antibody listed in Table 2 or Table 4 (e.g., 3A4, 3M12, or 5H12). In some embodiments, the molecular payload is a DMPK-targeting oligonucleotide (e.g., a DMPK-targeting oligonucleotide listed in Table 10 and Table 16, or a DMPK targeting oligonucleotide targeting a target sequence listed in Table 10).

[0729] In some embodiments, the complex described herein comprises an anti-TfR antibody covalently linked to a molecular payload, wherein the antibody is a Fab′ fragment of an IgG1 kappa that comprises human framework regions with the CDRs of a murine antibody listed in Table 2 or Table 4 (e.g., 3A4, 3M12, or 5H12). In some embodiments, the molecular payload is a DMPK-targeting oligonucleotide (e.g., a DMPK-targeting oligonucleotide listed in Table 10 and Table 16, or a DMPK targeting oligonucleotide targeting a target sequence listed in Table 10).

[0730] In some embodiments, the complex described herein comprises an anti-TfR antibody covalently linked via a lysine to the 5′ end of an oligonucleotide, wherein the antibody is a Fab′ fragment of an IgG1 kappa that comprises human framework regions with the CDRs of a murine antibody listed in Table 2 or Table 4 (e.g., 3A4, 3M12, or 5H12), wherein the complex has the structure of:

[chemical structure]

wherein n is 3 and m is 4 and wherein L1 is

[chemical structure]

optionally wherein the DMPK targeting oligonucleotide comprises a region of complementarity of at least 16 nucleotides to a target sequence as set forth in any one of SEQ ID NO: 482-717 and 2329-3861, further optionally wherein the DMPK targeting oligonucleotide (e.g., a gapmer) comprises at least 10, 11, 12, 13, 14, 15, 16, 17, 18, 19, or 20 consecutive nucleotides (e.g., 10, 11, 12, 13, 14, 15, 16, 17, 18, 19, or 20 consecutive nucleotides) of the nucleotide sequence of any one of SEQ ID NOs: 246-481 and 778-795 (e.g., any one of SEQ ID NOs: 257, 260, 270, 272, 278, 280, 286, 288, 293, 294, 299, 301, 310, 313, 316, 320, 346, and 362).

[0731] In some embodiments, the complex described herein comprises an anti-TfR antibody covalently linked via a lysine to the 5′ end of an oligonucleotide, wherein the antibody is a Fab′ fragment of an IgG1 kappa that comprises a heavy chain comprising the amino acid sequence of SEQ ID NO: 777 and a light chain comprising the amino acid sequence of SEQ ID NO: 212, wherein the complex has the structure of:

[chemical structure]

wherein n is 3 and m is 4 and wherein L1 is

[chemical structure]

optionally wherein the DMPK targeting oligonucleotide comprises a region of complementarity of at least 16 nucleotides to a target sequence as set forth in any one of SEQ ID NO: 482-717 and 2329-3861, further optionally wherein the DMPK targeting oligonucleotide (e.g., a gapmer) comprises at least 10, 11, 12, 13, 14, 15, 16, 17, 18, 19, or 20 consecutive nucleotides (e.g., 10, 11, 12, 13, 14, 15, 16, 17, 18, 19, or 20 consecutive nucleotides) of the nucleotide sequence of any one of SEQ ID NOs: 246-481 and 778-795 (e.g., any one of SEQ ID NOs: 257, 260, 270, 272, 278, 280, 286, 288, 293, 294, 299, 301, 310, 313, 316, 320, 346, and 362).

[0732] In some embodiments, the complex described herein comprises an anti-TfR antibody covalently linked via a lysine to the 5′ end of an oligonucleotide, wherein the antibody is a Fab′ fragment of an IgG1 kappa that comprises a heavy chain comprising the amino acid sequence of SEQ ID NO: 213 and a light chain comprising the amino acid sequence of SEQ ID NO: 212, wherein the complex has the structure of:

[chemical structure]

wherein n is 3 and m is 4 and wherein L1 is

[chemical structure]

optionally wherein the DMPK targeting oligonucleotide comprises a region of complementarity of at least 16 nucleotides to a target sequence as set forth in any one of SEQ ID NO: 482-717 and 2329-3861, further optionally wherein the DMPK targeting oligonucleotide (e.g., a gapmer) comprises at least 10, 11, 12, 13, 14, 15, 16, 17, 18, 19, or 20 consecutive nucleotides (e.g., 10, 11, 12, 13, 14, 15, 16, 17, 18, 19, or 20 consecutive nucleotides) of the nucleotide sequence of any one of SEQ ID NOs: 246-481 and 778-795 (e.g., any one of SEQ ID NOs: 257, 260, 270, 272, 278, 280, 286, 288, 293, 294, 299, 301, 310, 313, 316, 320, 346, and 362).

[0733] In some embodiments, the complex described herein comprises an anti-TfR Fab covalently linked via a lysine to the 5′ end of an oligonucleotide (e.g., a DMPK-targeting oligonucleotide), wherein the anti-TfR Fab comprises a CDR-H1 as set forth in SEQ ID NO: 1, a CDR-H2 as set forth in SEQ ID NO: 2, a CDR-H3 as set forth in SEQ ID NO: 3, a CDR-L1 as set forth in SEQ ID NO: 4, a CDR-L2 as set forth in SEQ ID NO: 5, and a CDR-L3 as set forth in SEQ ID NO: 6: wherein the complex has the structure of:

[chemical structure]

wherein n is 3 and m is 4 and wherein L1 is

[chemical structure]

optionally wherein the DMPK targeting oligonucleotide comprises a region of complementarity of at least 16 nucleotides to a target sequence as set forth in any one of SEQ ID NO: 482-717 and 2329-3861, further optionally wherein the DMPK targeting oligonucleotide (e.g., a gapmer) comprises at least 10, 11, 12, 13, 14, 15, 16, 17, 18, 19, or 20 consecutive nucleotides (e.g., 10, 11, 12, 13, 14, 15, 16, 17, 18, 19, or 20 consecutive nucleotides) of the nucleotide sequence of any one of SEQ ID NOs: 246-481 and 778-795 (e.g., any one of SEQ ID NOs: 257, 260, 270, 272, 278, 280, 286, 288, 293, 294, 299, 301, 310, 313, 316, 320, 346, and 362).

[0734] In some embodiments, the complex described herein comprises an anti-TfR Fab covalently linked via a lysine to the 5′ end of an oligonucleotide (e.g., a DMPK-targeting oligonucleotide), wherein the anti-TfR Fab comprises a CDR-H1 as set forth in SEQ ID NO: 1, a CDR-H2 as set forth in SEQ ID NO: 731, a CDR-H3 as set forth in SEQ ID NO: 3, a CDR-L1 as set forth in SEQ ID NO: 4, a CDR-L2 as set forth in SEQ ID NO: 5, and a CDR-L3 as set forth in SEQ ID NO: 6; wherein the complex has the structure of:

[chemical structure]

wherein n is 3 and m is 4 and wherein L1 is

[chemical structure]

optionally wherein the DMPK targeting oligonucleotide comprises a region of complementarity of at least 16 nucleotides to a target sequence as set forth in any one of SEQ ID NO: 482-717 and 2329-3861, further optionally wherein the DMPK targeting oligonucleotide (e.g., a gapmer) comprises at least 10, 11, 12, 13, 14, 15, 16, 17, 18, 19, or 20 consecutive nucleotides (e.g., 10, 11, 12, 13, 14, 15, 16, 17, 18, 19, or 20 consecutive nucleotides) of the nucleotide sequence of any one of SEQ ID NOs: 246-481 and 778-795 (e.g., any one of SEQ ID NOs: 257, 260, 270, 272, 278, 280, 286, 288, 293, 294, 299, 301, 310, 313, 316, 320, 346, and 362).

[0735] In some embodiments, the complex described herein comprises an anti-TfR Fab covalently linked via a lysine to the 5′ end of an oligonucleotide (e.g., a DMPK-targeting oligonucleotide), wherein the anti-TfR Fab comprises a CDR-H1 as set forth in SEQ ID NO: 1, a CDR-H2 as set forth in SEQ ID NO: 80, a CDR-H3 as set forth in SEQ ID NO: 3, a CDR-L1 as set forth in SEQ ID NO: 4, a CDR-L2 as set forth in SEQ ID NO: 5, and a CDR-L3 as set forth in SEQ ID NO: 6: wherein the complex has the structure of:

[chemical structure]

wherein n is 3 and m is 4 and wherein L1 is

[chemical structure]

optionally wherein the DMPK targeting oligonucleotide comprises a region of complementarity of at least 16 nucleotides to a target sequence as set forth in any one of SEQ ID NO: 482-717 and 2329-3861, further optionally wherein the DMPK targeting oligonucleotide (e.g., a gapmer) comprises at least 10, 11, 12, 13, 14, 15, 16, 17, 18, 19, or 20 consecutive nucleotides (e.g., 10, 11, 12, 13, 14, 15, 16, 17, 18, 19, or 20 consecutive nucleotides) of the nucleotide sequence of any one of SEQ ID NOs: 246-481 and 778-795 (e.g., any one of SEQ ID NOs: 257, 260, 270, 272, 278, 280, 286, 288, 293, 294, 299, 301, 310, 313, 316, 320, 346, and 362).

[0736] In some embodiments, the complex described herein comprises an anti-TfR Fab covalently linked via a lysine to the 5′ end of an oligonucleotide (e.g., a DMPK-targeting oligonucleotide), wherein the anti-TfR Fab comprises a CDR-H1 as set forth in SEQ ID NO: 145, a CDR-H2 as set forth in SEQ ID NO: 146, a CDR-H3 as set forth in SEQ ID NO: 147, a CDR-L1 as set forth in SEQ ID NO: 148, a CDR-L2 as set forth in SEQ ID NO: 149, and a CDR-L3 as set forth in SEQ ID NO: 6; wherein the complex has the structure of:

[chemical structure]

wherein n is 3 and m is 4 and wherein L1 is

[chemical structure]

optionally wherein the DMPK targeting oligonucleotide comprises a region of complementarity of at least 16 nucleotides to a target sequence as set forth in any one of SEQ ID NO: 482-717 and 2329-3861, further optionally wherein the DMPK targeting oligonucleotide (e.g., a gapmer) comprises at least 10, 11, 12, 13, 14, 15, 16, 17, 18, 19, or 20 consecutive nucleotides (e.g., 10, 11, 12, 13, 14, 15, 16, 17, 18, 19, or 20 consecutive nucleotides) of the nucleotide sequence of any one of SEQ ID NOs: 246-481 and 778-795 (e.g., any one of SEQ ID NOs: 257, 260, 270, 272, 278, 280, 286, 288, 293, 294, 299, 301, 310, 313, 316, 320, 346, and 362).

[0737] In some embodiments, the complex described herein comprises an anti-TfR Fab covalently linked via a lysine to the 5′ end of an oligonucleotide (e.g., a DMPK-targeting oligonucleotide), wherein the anti-TfR Fab comprises a CDR-H1 as set forth in SEQ ID NO: 145, a CDR-H2 as set forth in SEQ ID NO: 732, a CDR-H3 as set forth in SEQ ID NO: 147, a CDR-L1 as set forth in SEQ ID NO: 148, a CDR-L2 as set forth in SEQ ID NO: 149, and a CDR-L3 as set forth in SEQ ID NO: 6; wherein the complex has the structure of:

[chemical structure]

wherein n is 3 and m is 4 and wherein L1 is

[chemical structure]

optionally wherein the DMPK targeting oligonucleotide comprises a region of complementarity of at least 16 nucleotides to a target sequence as set forth in any one of SEQ ID NO: 482-717 and 2329-3861, further optionally wherein the DMPK targeting oligonucleotide (e.g., a gapmer) comprises at least 10, 11, 12, 13, 14, 15, 16, 17, 18, 19, or 20 consecutive nucleotides (e.g., 10, 11, 12, 13, 14, 15, 16, 17, 18, 19, or 20 consecutive nucleotides) of the nucleotide sequence of any one of SEQ ID NOs: 246-481 and 778-795 (e.g., any one of SEQ ID NOs: 257, 260, 270, 272, 278, 280, 286, 288, 293, 294, 299, 301, 310, 313, 316, 320, 346, and 362).

[0738] In some embodiments, the complex described herein comprises an anti-TfR Fab covalently linked via a lysine to the 5′ end of an oligonucleotide (e.g., a DMPK-targeting oligonucleotide), wherein the anti-TfR Fab comprises a CDR-H1 as set forth in SEQ ID NO: 145, a CDR-H2 as set forth in SEQ ID NO: 734, a CDR-H3 as set forth in SEQ ID NO: 147, a CDR-L1 as set forth in SEQ ID NO: 148, a CDR-L2 as set forth in SEQ ID NO: 149, and a CDR-L3 as set forth in SEQ ID NO: 6; wherein the complex has the structure of:

[chemical structure]

wherein n is 3 and m is 4 and wherein L1 is

[chemical structure]

optionally wherein the DMPK targeting oligonucleotide comprises a region of complementarity of at least 16 nucleotides to a target sequence as set forth in any one of SEQ ID NO: 482-717 and 2329-3861, further optionally wherein the DMPK targeting oligonucleotide (e.g., a gapmer) comprises at least 10, 11, 12, 13, 14, 15, 16, 17, 18, 19, or 20 consecutive nucleotides (e.g., 10, 11, 12, 13, 14, 15, 16, 17, 18, 19, or 20 consecutive nucleotides) of the nucleotide sequence of any one of SEQ ID NOs: 246-481 and 778-795 (e.g., any one of SEQ ID NOs: 257, 260, 270, 272, 278, 280, 286, 288, 293, 294, 299, 301, 310, 313, 316, 320, 346, and 362).

[0739] In some embodiments, the complex described herein comprises an anti-TfR Fab covalently linked via a lysine to the 5′ end of an oligonucleotide (e.g., a DMPK-targeting oligonucleotide), wherein the anti-TfR Fab comprises a CDR-H1 as set forth in SEQ ID NO: 150, a CDR-H2 as set forth in SEQ ID NO: 151, a CDR-H3 as set forth in SEQ ID NO: 152, a CDR-L1 as set forth in SEQ ID NO: 153, a CDR-L2 as set forth in SEQ ID NO: 5, and a CDR-L3 as set forth in SEQ ID NO: 154; wherein the complex has the structure of:

[chemical structure]

wherein n is 3 and m is 4 and wherein L1 is

[chemical structure]

optionally wherein the DMPK targeting oligonucleotide comprises a region of complementarity of at least 16 nucleotides to a target sequence as set forth in any one of SEQ ID NO: 482-717 and 2329-3861, further optionally wherein the DMPK targeting oligonucleotide (e.g., a gapmer) comprises at least 10, 11, 12, 13, 14, 15, 16, 17, 18, 19, or 20 consecutive nucleotides (e.g., 10, 11, 12, 13, 14, 15, 16, 17, 18, 19, or 20 consecutive nucleotides) of the nucleotide sequence of any one of SEQ ID NOs: 246-481 and 778-795 (e.g., any one of SEQ ID NOs: 257, 260, 270, 272, 278, 280, 286, 288, 293, 294, 299, 301, 310, 313, 316, 320, 346, and 362).

[0740] In some embodiments, the complex described herein comprises an anti-TfR Fab covalently linked via a lysine to the 5′ end of an oligonucleotide (e.g., a DMPK-targeting oligonucleotide), wherein the anti-TfR Fab comprises a CDR-H1 as set forth in SEQ ID NO: 150, a CDR-H2 as set forth in SEQ ID NO: 739, a CDR-H3 as set forth in SEQ ID NO: 152, a CDR-L1 as set forth in SEQ ID NO: 153, a CDR-L2 as set forth in SEQ ID NO: 5, and a CDR-L3 as set forth in SEQ ID NO: 154; wherein the complex has the structure of:

[chemical structure]

wherein n is 3 and m is 4 and wherein L1 is

[chemical structure]

optionally wherein the DMPK targeting oligonucleotide comprises a region of complementarity of at least 16 nucleotides to a target sequence as set forth in any one of SEQ ID NO: 482-717 and 2329-3861, further optionally wherein the DMPK targeting oligonucleotide (e.g., a gapmer) comprises at least 10, 11, 12, 13, 14, 15, 16, 17, 18, 19, or 20 consecutive nucleotides (e.g., 10, 11, 12, 13, 14, 15, 16, 17, 18, 19, or 20 consecutive nucleotides) of the nucleotide sequence of any one of SEQ ID NOs: 246-481 and 778-795 (e.g., any one of SEQ ID NOs: 257, 260, 270, 272, 278, 280, 286, 288, 293, 294, 299, 301, 310, 313, 316, 320, 346, and 362).

[0741] In some embodiments, the complex described herein comprises an anti-TfR Fab covalently linked via a lysine to the 5′ end of an oligonucleotide (e.g., a DMPK-targeting oligonucleotide), wherein the anti-TfR Fab comprises a CDR-H1 as set forth in SEQ ID NO: 150, a CDR-H2 as set forth in SEQ ID NO: 740, a CDR-H3 as set forth in SEQ ID NO: 152, a CDR-L1 as set forth in SEQ ID NO: 153, a CDR-L2 as set forth in SEQ ID NO: 5, and a CDR-L3 as set forth in SEO ID NO: 154: wherein the complex has the structure of:

[chemical structure]

wherein n is 3 and m is 4 and wherein L1 is

[chemical structure]

optionally wherein the DMPK targeting oligonucleotide comprises a region of complementarity of at least 16 nucleotides to a target sequence as set forth in any one of SEQ ID NO: 482-717 and 2329-3861, further optionally wherein the DMPK targeting oligonucleotide (e.g., a gapmer) comprises at least 10, 11, 12, 13, 14, 15, 16, 17, 18, 19, or 20 consecutive nucleotides (e.g., 10, 11, 12, 13, 14, 15, 16, 17, 18, 19, or 20 consecutive nucleotides) of the nucleotide sequence of any one of SEQ ID NOs: 246-481 and 778-795 (e.g., any one of SEQ ID NOs: 257, 260, 270, 272, 278, 280, 286, 288, 293, 294, 299, 301, 310, 313, 316, 320, 346, and 362).

[0742] In some embodiments, the complex described herein comprises an anti-TfR Fab covalently linked via a lysine to the 5′ end of an oligonucleotide (e.g., a DMPK-targeting oligonucleotide), wherein the anti-TfR Fab comprises a CDR-H1 as set forth in SEQ ID NO: 9, a CDR-H2 as set forth in SEQ ID NO: 10, a CDR-H3 as set forth in SEQ ID NO: 11, a CDR-L1 as set forth in SEQ ID NO: 12, a CDR-L2 as set forth in SEQ ID NO: 13, and a CDR-L3 as set forth in SEO ID NO: 14: wherein the complex has the structure of:

[chemical structure]

wherein n is 3 and m is 4 and wherein L1 is

[chemical structure]

optionally wherein the DMPK targeting oligonucleotide comprises a region of complementarity of at least 16 nucleotides to a target sequence as set forth in any one of SEQ ID NO: 482-717 and 2329-3861, further optionally wherein the DMPK targeting oligonucleotide (e.g., a gapmer) comprises at least 10, 11, 12, 13, 14, 15, 16, 17, 18, 19, or 20 consecutive nucleotides (e.g., 10, 11, 12, 13, 14, 15, 16, 17, 18, 19, or 20 consecutive nucleotides) of the nucleotide sequence of any one of SEQ ID NOs: 246-481 and 778-795 (e.g., any one of SEQ ID NOs: 257, 260, 270, 272, 278, 280, 286, 288, 293, 294, 299, 301, 310, 313, 316, 320, 346, and 362).

[0743] In some embodiments, the complex described herein comprises an anti-TfR Fab covalently linked via a lysine to the 5′ end of an oligonucleotide (e.g., a DMPK-targeting oligonucleotide), wherein the anti-TfR Fab comprises a CDR-H1 as set forth in SEQ ID NO: 155, a CDR-H2 as set forth in SEQ ID NO: 156, a CDR-H3 as set forth in SEQ ID NO: 157, a CDR-L1 as set forth in SEQ ID NO: 158, a CDR-L2 as set forth in SEQ ID NO: 159, and a CDR-L3 as set forth in SEQ ID NO: 14; wherein the complex has the structure of:

[chemical structure]

wherein n is 3 and m is 4 and wherein L1 is

[chemical structure]

optionally wherein the DMPK targeting oligonucleotide comprises a region of complementarity of at least 16 nucleotides to a target sequence as set forth in any one of SEQ ID NO: 482-717 and 2329-3861, further optionally wherein the DMPK targeting oligonucleotide (e.g., a gapmer) comprises at least 10, 11, 12, 13, 14, 15, 16, 17, 18, 19, or 20 consecutive nucleotides (e.g., 10, 11, 12, 13, 14, 15, 16, 17, 18, 19, or 20 consecutive nucleotides) of the nucleotide sequence of any one of SEQ ID NOs: 246-481 and 778-795 (e.g., any one of SEQ ID NOs: 257, 260, 270, 272, 278, 280, 286, 288, 293, 294, 299, 301, 310, 313, 316, 320, 346, and 362).

[0744] In some embodiments, the complex described herein comprises an anti-TfR Fab covalently linked via a lysine to the 5′ end of an oligonucleotide (e.g., a DMPK-targeting oligonucleotide), wherein the anti-TfR Fab comprises a CDR-H1 as set forth in SEQ ID NO: 160, a CDR-H2 as set forth in SEQ ID NO: 161, a CDR-H3 as set forth in SEQ ID NO: 162, a CDR-L1 as set forth in SEQ ID NO: 163, a CDR-L2 as set forth in SEQ ID NO: 13, and a CDR-L3 as set forth in SEQ ID NO: 164; wherein the complex has the structure of:

[chemical structure]

wherein n is 3 and m is 4 and wherein L1 is

[chemical structure]

optionally wherein the DMPK targeting oligonucleotide comprises a region of complementarity of at least 16 nucleotides to a target sequence as set forth in any one of SEQ ID NO: 482-717 and 2329-3861, further optionally wherein the DMPK targeting oligonucleotide (e.g., a gapmer) comprises at least 10, 11, 12, 13, 14, 15, 16, 17, 18, 19, or 20 consecutive nucleotides (e.g., 10, 11, 12, 13, 14, 15, 16, 17, 18, 19, or 20 consecutive nucleotides) of the nucleotide sequence of any one of SEQ ID NOs: 246-481 and 778-795 (e.g., any one of SEQ ID NOs: 257, 260, 270, 272, 278, 280, 286, 288, 293, 294, 299, 301, 310, 313, 316, 320, 346, and 362).

[0745] In some embodiments, the complex described herein comprises an anti-TfR Fab covalently linked via a lysine to the 5′ end of an oligonucleotide (e.g., a DMPK-targeting oligonucleotide), wherein the anti-TfR Fab comprises a CDR-H1 as set forth in SEQ ID NO: 17, a CDR-H2 as set forth in SEQ ID NO: 18, a CDR-H3 as set forth in SEQ ID NO: 19, a CDR-L1 as set forth in SEQ ID NO: 20, a CDR-L2 as set forth in SEQ ID NO: 21, and a CDR-L3 as set forth in SEQ ID NO: 22; wherein the complex has the structure of:

[chemical structure]

wherein n is 3 and m is 4 and wherein L1 is

[chemical structure]

optionally wherein the DMPK targeting oligonucleotide comprises a region of complementarity of at least 16 nucleotides to a target sequence as set forth in any one of SEQ ID NO: 482-717 and 2329-3861, further optionally wherein the DMPK targeting oligonucleotide (e.g., a gapmer) comprises at least 10, 11, 12, 13, 14, 15, 16, 17, 18, 19, or 20 consecutive nucleotides (e.g., 10, 11, 12, 13, 14, 15, 16, 17, 18, 19, or 20 consecutive nucleotides) of the nucleotide sequence of any one of SEQ ID NOs: 246-481 and 778-795 (e.g., any one of SEQ ID NOs: 257, 260, 270, 272, 278, 280, 286, 288, 293, 294, 299, 301, 310, 313, 316, 320, 346, and 362).

[0746] In some embodiments, the complex described herein comprises an anti-TfR Fab covalently linked via a lysine to the 5′ end of an oligonucleotide (e.g., a DMPK-targeting oligonucleotide), wherein the anti-TfR Fab comprises a CDR-H1 as set forth in SEQ ID NO: 735, a CDR-H2 as set forth in SEQ ID NO: 18, a CDR-H3 as set forth in SEQ ID NO: 19, a CDR-L1 as set forth in SEQ ID NO: 20, a CDR-L2 as set forth in SEQ ID NO: 21, and a CDR-L3 as set forth in SEQ ID NO: 22; wherein the complex has the structure of:

[chemical structure]

wherein n is 3 and m is 4 and wherein L1 is

[chemical structure]

optionally wherein the DMPK targeting oligonucleotide comprises a region of complementarity of at least 16 nucleotides to a target sequence as set forth in any one of SEQ ID NO: 482-717 and 2329-3861, further optionally wherein the DMPK targeting oligonucleotide (e.g., a gapmer) comprises at least 10, 11, 12, 13, 14, 15, 16, 17, 18, 19, or 20 consecutive nucleotides (e.g., 10, 11, 12, 13, 14, 15, 16, 17, 18, 19, or 20 consecutive nucleotides) of the nucleotide sequence of any one of SEQ ID NOs: 246-481 and 778-795 (e.g., any one of SEQ ID NOs: 257, 260, 270, 272, 278, 280, 286, 288, 293, 294, 299, 301, 310, 313, 316, 320, 346, and 362).

[0747] In some embodiments, the complex described herein comprises an anti-TfR Fab covalently linked via a lysine to the 5′ end of an oligonucleotide (e.g., a DMPK-targeting oligonucleotide), wherein the anti-TfR Fab comprises a CDR-H1 as set forth in SEQ ID NO: 737, a CDR-H2 as set forth in SEQ ID NO: 18, a CDR-H3 as set forth in SEQ ID NO: 19, a CDR-L1 as set forth in SEQ ID NO: 20, a CDR-L2 as set forth in SEQ ID NO: 21, and a CDR-L3 as set forth in SEQ ID NO: 22; wherein the complex has the structure of:

[chemical structure]

wherein n is 3 and m is 4 and wherein L1 is

[chemical structure]

optionally wherein the DMPK targeting oligonucleotide comprises a region of complementarity of at least 16 nucleotides to a target sequence as set forth in any one of SEQ ID NO: 482-717 and 2329-3861, further optionally wherein the DMPK targeting oligonucleotide (e.g., a gapmer) comprises at least 10, 11, 12, 13, 14, 15, 16, 17, 18, 19, or 20 consecutive nucleotides (e.g., 10, 11, 12, 13, 14, 15, 16, 17, 18, 19, or 20 consecutive nucleotides) of the nucleotide sequence of any one of SEQ ID NOs: 246-481 and 778-795 (e.g., any one of SEQ ID NOs: 257, 260, 270, 272, 278, 280, 286, 288, 293, 294, 299, 301, 310, 313, 316, 320, 346, and 362).

[0748] In some embodiments, the complex described herein comprises an anti-TfR Fab covalently linked via a lysine to the 5′ end of an oligonucleotide (e.g., a DMPK-targeting oligonucleotide), wherein the anti-TfR Fab comprises a CDR-H1 as set forth in SEQ ID NO: 165, a CDR-H2 as set forth in SEQ ID NO: 166, a CDR-H3 as set forth in SEQ ID NO: 167, a CDR-L1 as set forth in SEQ ID NO: 168, a CDR-L2 as set forth in SEQ ID NO: 169, and a CDR-L3 as set forth in SEQ ID NO: 22; wherein the complex has the structure of:

[chemical structure]

wherein n is 3 and m is 4 and wherein L1 is

[chemical structure]

optionally wherein the DMPK targeting oligonucleotide comprises a region of complementarity of at least 16 nucleotides to a target sequence as set forth in any one of SEQ ID NO: 482-717 and 2329-3861, further optionally wherein the DMPK targeting oligonucleotide (e.g., a gapmer) comprises at least 10, 11, 12, 13, 14, 15, 16, 17, 18, 19, or 20 consecutive nucleotides (e.g., 10, 11, 12, 13, 14, 15, 16, 17, 18, 19, or 20 consecutive nucleotides) of the nucleotide sequence of any one of SEQ ID NOs: 246-481 and 778-795 (e.g., any one of SEQ ID NOs: 257, 260, 270, 272, 278, 280, 286, 288, 293, 294, 299, 301, 310, 313, 316, 320, 346, and 362).

[0749] In some embodiments, the complex described herein comprises an anti-TfR Fab covalently linked via a lysine to the 5′ end of an oligonucleotide (e.g., a DMPK-targeting oligonucleotide), wherein the anti-TfR Fab comprises a CDR-H1 as set forth in SEQ ID NO: 736, a CDR-H2 as set forth in SEQ ID NO: 166, a CDR-H3 as set forth in SEQ ID NO: 167, a CDR-L1 as set forth in SEQ ID NO: 168, a CDR-L2 as set forth in SEQ ID NO: 169, and a CDR-L3 as set forth in SEQ ID NO: 22; wherein the complex has the structure of:

[chemical structure]

wherein n is 3 and m is 4 and wherein L1 is

[chemical structure]

optionally wherein the DMPK targeting oligonucleotide comprises a region of complementarity of at least 16 nucleotides to a target sequence as set forth in any one of SEQ ID NO: 482-717 and 2329-3861, further optionally wherein the DMPK targeting oligonucleotide (e.g., a gapmer) comprises at least 10, 11, 12, 13, 14, 15, 16, 17, 18, 19, or 20 consecutive nucleotides (e.g., 10, 11, 12, 13, 14, 15, 16, 17, 18, 19, or 20 consecutive nucleotides) of the nucleotide sequence of any one of SEQ ID NOs: 246-481 and 778-795 (e.g., any one of SEQ ID NOs: 257, 260, 270, 272, 278, 280, 286, 288, 293, 294, 299, 301, 310, 313, 316, 320, 346, and 362).

[0750] In some embodiments, the complex described herein comprises an anti-TfR Fab covalently linked via a lysine to the 5′ end of an oligonucleotide (e.g., a DMPK-targeting oligonucleotide), wherein the anti-TfR Fab comprises a CDR-H1 as set forth in SEQ ID NO: 738, a CDR-H2 as set forth in SEQ ID NO: 166, a CDR-H3 as set forth in SEQ ID NO: 167, a CDR-L1 as set forth in SEQ ID NO: 168, a CDR-L2 as set forth in SEQ ID NO: 169, and a CDR-L3 as set forth in SEQ ID NO: 22; wherein the complex has the structure of:

[chemical structure]

wherein n is 3 and m is 4 and wherein L1 is

[chemical structure]

optionally wherein the DMPK targeting oligonucleotide comprises a region of complementarity of at least 16 nucleotides to a target sequence as set forth in any one of SEQ ID NO: 482-717 and 2329-3861, further optionally wherein the DMPK targeting oligonucleotide (e.g., a gapmer) comprises at least 10, 11, 12, 13, 14, 15, 16, 17, 18, 19, or 20 consecutive nucleotides (e.g., 10, 11, 12, 13, 14, 15, 16, 17, 18, 19, or 20 consecutive nucleotides) of the nucleotide sequence of any one of SEQ ID NOs: 246-481 and 778-795 (e.g., any one of SEQ ID NOs: 257, 260, 270, 272, 278, 280, 286, 288, 293, 294, 299, 301, 310, 313, 316, 320, 346, and 362).

[0751] In some embodiments, the complex described herein comprises an anti-TfR Fab covalently linked via a lysine to the 5′ end of an oligonucleotide (e.g., a DMPK-targeting oligonucleotide), wherein the anti-TfR Fab comprises a CDR-H1 as set forth in SEQ ID NO: 170, a CDR-H2 as set forth in SEQ ID NO: 171, a CDR-H3 as set forth in SEQ ID NO: 172, a CDR-L1 as set forth in SEQ ID NO: 173, a CDR-L2 as set forth in SEQ ID NO: 21, and a CDR-L3 as set forth in SEQ ID NO: 174; wherein the complex has the structure of:

[chemical structure]

wherein n is 3 and m is 4 and wherein L1 is

[chemical structure]

optionally wherein the DMPK targeting oligonucleotide comprises a region of complementarity of at least 16 nucleotides to a target sequence as set forth in any one of SEQ ID NO: 482-717 and 2329-3861, further optionally wherein the DMPK targeting oligonucleotide (e.g., a gapmer) comprises at least 10, 11, 12, 13, 14, 15, 16, 17, 18, 19, or 20 consecutive nucleotides (e.g., 10, 11, 12, 13, 14, 15, 16, 17, 18, 19, or 20 consecutive nucleotides) of the nucleotide sequence of any one of SEQ ID NOs: 246-481 and 778-795 (e.g., any one of SEQ ID NOs: 257, 260, 270, 272, 278, 280, 286, 288, 293, 294, 299, 301, 310, 313, 316, 320, 346, and 362).

[0752] In some embodiments, the complex described herein comprises an anti-TfR Fab covalently linked via a lysine to the 5′ end of an oligonucleotide (e.g., a DMPK-targeting oligonucleotide), wherein the anti-TfR Fab comprises a CDR-H1 as set forth in SEQ ID NO: 188, a CDR-H2 as set forth in SEQ ID NO: 189, a CDR-H3 as set forth in SEQ ID NO: 190, a CDR-L1 as set forth in SEQ ID NO: 191, a CDR-L2 as set forth in SEQ ID NO: 192, and a CDR-L3 as set forth in SEQ ID NO: 193; wherein the complex has the structure of:

[chemical structure]

wherein n is 3 and m is 4 and wherein L1 is

[chemical structure]

optionally wherein the DMPK targeting oligonucleotide comprises a region of complementarity of at least 16 nucleotides to a target sequence as set forth in any one of SEQ ID NO: 482-717 and 2329-3861, further optionally wherein the DMPK targeting oligonucleotide (e.g., a gapmer) comprises at least 10, 11, 12, 13, 14, 15, 16, 17, 18, 19, or 20 consecutive nucleotides (e.g., 10, 11, 12, 13, 14, 15, 16, 17, 18, 19, or 20 consecutive nucleotides) of the nucleotide sequence of any one of SEQ ID NOs: 246-481 and 778-795 (e.g., any one of SEQ ID NOs: 257, 260, 270, 272, 278, 280, 286, 288, 293, 294, 299, 301, 310, 313, 316, 320, 346, and 362).

[0753] In some embodiments, the complex described herein comprises an anti-TfR Fab covalently linked via a lysine to the 5′ end of an oligonucleotide (e.g., a DMPK-targeting oligonucleotide), wherein the anti-TfR Fab comprises a CDR-H1 as set forth in SEQ ID NO: 194, a CDR-H2 as set forth in SEQ ID NO: 195, a CDR-H3 as set forth in SEQ ID NO: 196, a CDR-L1 as set forth in SEQ ID NO: 197, a CDR-L2 as set forth in SEQ ID NO: 198, and a CDR-L3 as set forth in SEQ ID NO: 193; wherein the complex has the structure of:

[chemical structure]

wherein n is 3 and m is 4 and wherein L1 is

[chemical structure]

optionally wherein the DMPK targeting oligonucleotide comprises a region of complementarity of at least 16 nucleotides to a target sequence as set forth in any one of SEQ ID NO: 482-717 and 2329-3861, further optionally wherein the DMPK targeting oligonucleotide (e.g., a gapmer) comprises at least 10, 11, 12, 13, 14, 15, 16, 17, 18, 19, or 20 consecutive nucleotides (e.g., 10, 11, 12, 13, 14, 15, 16, 17, 18, 19, or 20 consecutive nucleotides) of the nucleotide sequence of any one of SEQ ID NOs: 246-481 and 778-795 (e.g., any one of SEQ ID NOs: 257, 260, 270, 272, 278, 280, 286, 288, 293, 294, 299, 301, 310, 313, 316, 320, 346, and 362).

[0754] In some embodiments, the complex described herein comprises an anti-TfR Fab covalently linked via a lysine to the 5′ end of an oligonucleotide (e.g., a DMPK-targeting oligonucleotide), wherein the anti-TfR Fab comprises a CDR-H1 as set forth in SEQ ID NO: 199, a CDR-H2 as set forth in SEQ ID NO: 200, a CDR-H3 as set forth in SEQ ID NO: 201, a CDR-L1 as set forth in SEQ ID NO: 202, a CDR-L2 as set forth in SEQ ID NO: 192, and a CDR-L3 as set forth in SEQ ID NO: 203; wherein the complex has the structure of:

[chemical structure]

wherein n is 3 and m is 4 and wherein L1 is

[chemical structure]

optionally wherein the DMPK targeting oligonucleotide comprises a region of complementarity of at least 16 nucleotides to a target sequence as set forth in any one of SEQ ID NO: 482-717 and 2329-3861, further optionally wherein the DMPK targeting oligonucleotide (e.g., a gapmer) comprises at least 10, 11, 12, 13, 14, 15, 16, 17, 18, 19, or 20 consecutive nucleotides (e.g., 10, 11, 12, 13, 14, 15, 16, 17, 18, 19, or 20 consecutive nucleotides) of the nucleotide sequence of any one of SEQ ID NOs: 246-481 and 778-795 (e.g., any one of SEQ ID NOs: 257, 260, 270, 272, 278, 280, 286, 288, 293, 294, 299, 301, 310, 313, 316, 320, 346, and 362).

[0755] In some embodiments, in any one of the examples of complexes, L1 is linked to the 5′ phosphate of the oligonucleotide. In some embodiments, L1 is linked to the 5′ phosphorothioate of the oligonucleotide. In some embodiments, L1 is linked to the 5′ phosphonoamidate of the oligonucleotide.

[0756] In some embodiments, L1 is optional (e.g., need not be present).

### III. Formulations

[0757] Complexes provided herein may be formulated in any suitable manner. Generally, complexes provided herein are formulated in a manner suitable for pharmaceutical use. For example, complexes can be delivered to a subject using a formulation that minimizes degradation, facilitates delivery and/or (e.g., and) uptake, or provides another beneficial property to the complexes in the formulation. In some embodiments, provided herein are compositions comprising complexes and pharmaceutically acceptable carriers. Such compositions can be suitably formulated such that when administered to a subject, either into the immediate environment of a target cell or systemically, a sufficient amount of the complexes enter target muscle cells. In some embodiments, complexes are formulated in buffer solutions such as phosphate-buffered saline solutions, liposomes, micellar structures, and capsids.

[0758] It should be appreciated that, in some embodiments, compositions may include separately one or more components of complexes provided herein (e.g., muscle-targeting agents, linkers, molecular payloads, or precursor molecules of any one of them).

[0759] In some embodiments, complexes are formulated in water or in an aqueous solution (e.g., water with pH adjustments). In some embodiments, complexes are formulated in basic buffered aqueous solutions (e.g., PBS). In some embodiments, formulations as disclosed herein comprise an excipient. In some embodiments, an excipient confers to a composition improved stability, improved absorption, improved solubility and/or (e.g., and) therapeutic enhancement of the active ingredient. In some embodiments, an excipient is a buffering agent (e.g., sodium citrate, sodium phosphate, a tris base, or sodium hydroxide) or a vehicle (e.g., a buffered solution, petrolatum, dimethyl sulfoxide, or mineral oil).

[0760] In some embodiments, a complex or component thereof (e.g., oligonucleotide or antibody) is lyophilized for extending its shelf-life and then made into a solution before use (e.g., administration to a subject). Accordingly, an excipient in a composition comprising a complex, or component thereof, described herein may be a lyoprotectant (e.g., mannitol, lactose, polyethylene glycol, or polyvinyl pyrolidone), or a collapse temperature modifier (e.g., dextran, ficoll, or gelatin).

[0761] In some embodiments, a pharmaceutical composition is formulated to be compatible with its intended route of administration. Examples of routes of administration include parenteral, e.g., intravenous, intradermal, subcutaneous, administration. Typically, the route of administration is intravenous or subcutaneous.

[0762] Pharmaceutical compositions suitable for injectable use include sterile aqueous solutions (where water soluble) or dispersions and sterile powders for the extemporaneous preparation of sterile injectable solutions or dispersions. The carrier can be a solvent or dispersion medium containing, for example, water, ethanol, polyol (for example, glycerol, propylene glycol, and liquid polyethylene glycol, and the like), and suitable mixtures thereof. In some embodiments, formulations include isotonic agents, for example, sugars, polyalcohols such as mannitol, sorbitol, and sodium chloride in the composition. Sterile injectable solutions can be prepared by incorporating the complexes in a required amount in a selected solvent with one or a combination of ingredients enumerated above, as required, followed by filtered sterilization.

[0763] In some embodiments, a composition may contain at least about 0.1% of the complex, or component thereof, or more, although the percentage of the active ingredient(s) may be between about 1% and about 80% or more of the weight or volume of the total composition. Factors such as solubility, bioavailability, biological half-life, route of administration, product shelf life, as well as other pharmacological considerations will be contemplated by one skilled in the art of preparing such pharmaceutical formulations, and as such, a variety of dosages and treatment regimens may be desirable.

### IV. Methods of Use/Treatment

[0764] Complexes comprising a muscle-targeting agent covalently linked to a molecular payload as described herein are effective in treating myotonic dystrophy. In some embodiments, complexes are effective in treating myotonic dystrophy type 1 (DM1). In some embodiments, DM1 is associated with an expansion of a CTG trinucleotide repeat in the 3′ non-coding region of DMPK. In some embodiments, the nucleotide expansions lead to toxic RNA repeats capable of forming hairpin structures that bind critical intracellular proteins, e.g., muscleblind-like proteins, with high affinity.

[0765] In some embodiments, a subject may be a human subject, a non-human primate subject, a rodent subject, or any suitable mammalian subject. In some embodiments, a subject may have myotonic dystrophy. In some embodiments, a subject has a DMPK allele, which may optionally contain a disease-associated repeat. In some embodiments, a subject may have a DMPK allele with an expanded disease-associated-repeat that comprises about 2-10 repeat units, about 2-50 repeat units, about 2-100 repeat units, about 50-1,000 repeat units, about 50-500 repeat units, about 50-250 repeat units, about 50-100 repeat units, about 500-10,000 repeat units, about 500-5,000 repeat units, about 500-2,500 repeat units, about 500-1,000 repeat units, or about 1,000-10,000 repeat units. In some embodiments, a subject is suffering from symptoms of DM1, e.g. muscle atrophy or muscle loss. In some embodiments, a subject is not suffering from symptoms of DM1. In some embodiments, subjects have congenital myotonic dystrophy.

[0766] An aspect of the disclosure includes a method involving administering to a subject an effective amount of a complex as described herein. In some embodiments, an effective amount of a pharmaceutical composition that comprises a complex comprising a muscle-targeting agent covalently linked to a molecular payload can be administered to a subject in need of treatment. In some embodiments, a pharmaceutical composition comprising a complex as described herein may be administered by a suitable route, which may include intravenous administration, e.g., as a bolus or by continuous infusion over a period of time. In some embodiments, intravenous administration may be performed by intramuscular, intraperitoneal, intracerebrospinal, subcutaneous, intra-articular, intrasynovial, or intrathecal routes. In some embodiments, a pharmaceutical composition may be in solid form, aqueous form, or a liquid form. In some embodiments, an aqueous or liquid form may be nebulized or lyophilized. In some embodiments, a nebulized or lyophilized form may be reconstituted with an aqueous or liquid solution.

[0767] Compositions for intravenous administration may contain various carriers such as vegetable oils, dimethylactamide, dimethyformamide, ethyl lactate, ethyl carbonate, isopropyl myristate, ethanol, and polyols (glycerol, propylene glycol, liquid polyethylene glycol, and the like). For intravenous injection, water soluble antibodies can be administered by the drip method, whereby a pharmaceutical formulation containing the antibody and a physiologically acceptable excipients is infused. Physiologically acceptable excipients may include, for example, 5% dextrose, 0.9% saline, Ringer's solution or other suitable excipients. Intramuscular preparations, e.g., a sterile formulation of a suitable soluble salt form of the antibody, can be dissolved and administered in a pharmaceutical excipient such as Water-for-Injection, 0.9% saline, or 5% glucose solution.

[0768] In some embodiments, a pharmaceutical composition that comprises a complex comprising a muscle-targeting agent covalently linked to a molecular payload is administered via site-specific or local delivery techniques. Examples of these techniques include implantable depot sources of the complex, local delivery catheters, site specific carriers, direct injection, or direct application.

[0769] In some embodiments, a pharmaceutical composition that comprises a complex comprising a muscle-targeting agent covalently linked to a molecular payload is administered at an effective concentration that confers therapeutic effect on a subject. Effective amounts vary, as recognized by those skilled in the art, depending on the severity of the disease, unique characteristics of the subject being treated, e.g. age, physical conditions, health, or weight, the duration of the treatment, the nature of any concurrent therapies, the route of administration and related factors. These related factors are known to those in the art and may be addressed with no more than routine experimentation. In some embodiments, an effective concentration is the maximum dose that is considered to be safe for the patient. In some embodiments, an effective concentration will be the lowest possible concentration that provides maximum efficacy.

[0770] Empirical considerations, e.g. the half-life of the complex in a subject, generally will contribute to determination of the concentration of pharmaceutical composition that is used for treatment. The frequency of administration may be empirically determined and adjusted to maximize the efficacy of the treatment.

[0771] Generally, for administration of any of the complexes described herein, an initial candidate dosage may be about 1 to 100 mg/kg, or more, depending on the factors described above, e.g. safety or efficacy. In some embodiments, a treatment will be administered once. In some embodiments, a treatment will be administered daily, biweekly, weekly, bimonthly, monthly, or at any time interval that provide maximum efficacy while minimizing safety risks to the subject. Generally, the efficacy and the treatment and safety risks may be monitored throughout the course of treatment.

[0772] In some embodiments, an initial candidate dosage is about 1-50, 1-25, 1-10, 1-5, 5-100, 5-50, 5-25, 5-10, 10-100, 10-75, 10-50, 10-25, 10-20, 25-100, 25-75, or 25-50 mg/kg. In some embodiments, an initial candidate dosage is about 1-20, 1-15, 1-10, 1-5, 1-3, 1-2, 5-20, 5-15, or 5-10 mg/kg. In some embodiments, an initial candidate dosage is about 1, 2, 3, 4, 5, 6, 7, 8, 9, 10, 15, or 20 mg/kg.

[0773] The efficacy of treatment may be assessed using any suitable methods. In some embodiments, the efficacy of treatment may be assessed by evaluation of observation of symptoms associated with DM1, e.g. muscle atrophy or muscle weakness, through measures of a subject's self-reported outcomes, e.g. mobility, self-care, usual activities, pain/discomfort, and anxiety/depression, or by quality-of-life indicators, e.g. lifespan.

[0774] In some embodiments, a pharmaceutical composition that comprises a complex comprising a muscle-targeting agent covalently linked to a molecular payload described herein is administered to a subject at an effective concentration sufficient to inhibit activity or expression of a target gene by at least 10%, at least 20%, at least 30%, at least 40%, at least 50%, at least 60%, at least 70%, at least 80%, at least 90% or at least 95% relative to a control, e.g. baseline level of gene expression prior to treatment.

[0775] In some embodiments, a single dose or administration of a pharmaceutical composition that comprises a complex comprising a muscle-targeting agent covalently linked to a molecular payload described herein to a subject is sufficient to inhibit activity or expression of a target gene for at least 1-5, 1-10, 5-15, 10-20, 15-30, 20-40, 25-50, or more days. In some embodiments, a single dose or administration of a pharmaceutical composition that comprises a complex comprising a muscle-targeting agent covalently linked to a molecular payload described herein to a subject is sufficient to inhibit activity or expression of a target gene for at least 1, 2, 3, 4, 5, 6, 7, 8, 9, 10, 11, 12, 15, 20, or 24 weeks. In some embodiments, a single dose or administration of a pharmaceutical composition that comprises a complex comprising a muscle-targeting agent covalently linked to a molecular payload described herein to a subject is sufficient to inhibit activity or expression of a target gene for at least 1-5, 1-10, 2-5, 2-10, 4-8, 4-12, 5-10, 5-12, 5-15, 8-12, 8-15, 10-12, 10-15, 10-20, 12-15, 12-20, 15-20, or 15-25 weeks. In some embodiments, a single dose or administration of a pharmaceutical composition that comprises a complex comprising a muscle-targeting agent covalently linked to a molecular payload described herein to a subject is sufficient to inhibit activity or expression of a target gene for at least 1, 2, 3, 4, 5, or 6 months.

[0776] In some embodiments, a single dose or administration of a pharmaceutical composition that comprises a complex comprising a muscle-targeting agent covalently linked to a molecular payload described herein to a subject persists or remains in the subject for at least 1-5, 1-10, 5-15, 10-20, 15-30, 20-40, 25-50, or more days. In some embodiments, a single dose or administration of a pharmaceutical composition that comprises a complex comprising a muscle-targeting agent covalently linked to a molecular payload described herein to a subject persists or remains in the subject for at least 1, 2, 3, 4, 5, 6, 7, 8, 9, 10, 11, 12, 15, 20, or 24 weeks. In some embodiments, a single dose or administration of a pharmaceutical composition that comprises a complex comprising a muscle-targeting agent covalently linked to a molecular payload described herein to a subject persists or remains in the subject for at least 1-5, 1-10, 2-5, 2-10, 4-8, 4-12, 5-10, 5-12, 5-15, 8-12, 8-15, 10-12, 10-15, 10-20, 12-15, 12-20, 15-20, or 15-25 weeks. In some embodiments, a single dose or administration of a pharmaceutical composition that comprises a complex comprising a muscle-targeting agent covalently linked to a molecular payload described herein to a subject persists or remains in the subject for at least 1, 2, 3, 4, 5, or 6 months.

[0777] In some embodiments, multiple doses or administrations of a pharmaceutical composition that comprises a complex comprising a muscle-targeting agent covalently linked to a molecular payload described herein are delivered to a subject. In some embodiments, multiple doses of a pharmaceutical composition comprise delivering 2, 3, 4, 5, 6, 7, 8, 9, or 10 doses to a subject. In some embodiments, multiple doses of a pharmaceutical composition comprise delivering a dose to a subject every 1, 2, 3, 4, 5, 6, 7, 8, 9, 10, 11, 12, 13, 14, 15, or 16 weeks. In some embodiments, multiple doses of a pharmaceutical composition comprise delivering a dose to a subject once every 4 weeks. In some embodiments, multiple doses of a pharmaceutical composition comprise delivering a dose to a subject once every 1-10, 2-5, 2-10, 4-8, 4-12, 5-10, 5-12, 5-15, 8-12, 8-16, 10-12, 10-15, 10-20, 12-15, 12-20, 15-20, or 15-25 weeks. In some embodiments, multiple doses of a pharmaceutical composition comprise delivering a dose to a subject on a biweekly (i.e., every two weeks), bimonthly (i.e., every two months), or quarterly schedule (i.e., every twelve weeks).

[0778] In some embodiments, a single dose or administration is about 1-50, 1-25, 1-10, 1-15, 1-5, 5-100, 5-50, 5-25, 5-10, 10-100, 10-75, 10-50, 10-25, 10-20, 25-100, 25-75, or 25-50 mg/kg. In some embodiments, a single dose or administration is about 1-20, 1-15, 1-10, 1-5, 1-3, 1-2, 5-20, 5-15, or 5-10 mg/kg. In some embodiments, a single dose or administration is about 1, 2, 3, 4, 5, 6, 7, 8, 9, 10, 11, 12, 13, 14, 15, or 20 mg/kg.

[0779] In some embodiments, a pharmaceutical composition that comprises a complex comprising a muscle-targeting agent covalently linked to a molecular payload described herein is delivered to a subject every 1, 2, 3, 4, 5, 6, 7, 8, 9, 10, 11, 12, 13, 14, 15, or 16 weeks. In some embodiments, a pharmaceutical composition that comprises a complex comprising a muscle-targeting agent covalently linked to a molecular payload described herein is delivered to a subject every 1-10, 2-5, 2-10, 4-8, 4-12, 5-10, 5-12, 5-15, 8-12, 8-16, 9-15, 10-12, 10-14, 10-15, 10-20, 11-13, 11-15, 12-15, 12-16, 12-20, 15-20, or 15-25 weeks. In some embodiments, a pharmaceutical composition that comprises a complex comprising a muscle-targeting agent covalently linked to a molecular payload described herein is delivered to a subject on a biweekly (i.e., every two weeks), bimonthly (i.e., every two months), or quarterly schedule (i.e., every twelve weeks).

[0780] In some embodiments, a pharmaceutical composition that comprises a complex comprising a muscle-targeting agent covalently linked to a molecular payload described herein at a concentration of 1-15 mg/kg of RNA is delivered to a subject every 1, 2, 3, 4, 5, 6, 7, 8, 9, 10, 11, 12, 13, 14, 15, or 16 weeks. In some embodiments, a pharmaceutical composition that comprises a complex comprising a muscle-targeting agent covalently linked to a molecular payload described herein at a concentration of 1-15 mg/kg of RNA is delivered to a subject every 1-10, 2-5, 2-10, 4-8, 4-12, 5-10, 5-12, 5-15, 8-12, 8-16, 9-15, 10-12, 10-14, 10-15, 10-20, 11-13, 11-15, 12-15, 12-16, 12-20, 15-20, or 15-25 weeks. In some embodiments, a pharmaceutical composition that comprises a complex comprising a muscle-targeting agent covalently linked to a molecular payload described herein at a concentration of 1-15 mg/kg of RNA is delivered to a subject on a biweekly (i.e., every two weeks), bimonthly (i.e., every two months), or quarterly schedule (i.e., every twelve weeks).

[0781] In some embodiments, a pharmaceutical composition may comprises more than one complex comprising a muscle-targeting agent covalently linked to a molecular payload. In some embodiments, a pharmaceutical composition may further comprise any other suitable therapeutic agent for treatment of a subject, e.g. a human subject having DM1. In some embodiments, the other therapeutic agents may enhance or supplement the effectiveness of the complexes described herein. In some embodiments, the other therapeutic agents may function to treat a different symptom or disease than the complexes described herein.

### EXAMPLES

### Example 1: Targeting DMPK with Transfected Antisense Oligonucleotides

[0782] A gapmer antisense oligonucleotide that targets both wild-type and mutant alleles of DMPK (control DMPK-ASO) was tested in vitro for its ability to reduce expression levels of DMPK in an immortalized cell line. Briefly, Hepa 1-6 cells were transfected with the control DMPK-ASO (100 nM) formulated with lipofectamine 2000. DMPK expression levels were evaluated 72 hours following transfection. A control experiment was also performed in which vehicle (phosphate-buffered saline) was delivered to Hepa 1-6 cells in culture and the cells were maintained for 72 hours. As shown in FIG. 1, it was found that the control DMPK-ASO reduced DMPK expression levels by ˜90% compared with controls.

### Example 2: Targeting DMPK with a Muscle-Targeting Complex

[0783] A muscle-targeting complex was generated comprising the DMPK ASO used in Example 1 (control DMPK-ASO) covalently linked, via a cathepsin cleavable linker, to DTX-A-002 (RI7 217 (Fab)), an anti-transferrin receptor antibody.

[0784] Briefly, a maleimidocaproyl-L-valine-L-citrulline-p-aminobenzyl alcohol p-nitrophenyl carbonate (MC-Val-Cit-PABC-PNP) linker molecule was coupled to NH₂-C₆-control DMPK-ASO using an amide coupling reaction. Excess linker and organic solvents were removed by gel permeation chromatography. The purified Val-Cit-linker-control DMPK-ASO was then coupled to a thiol-reactive anti-transferrin receptor antibody (DTX-A-002).

[0785] The product of the antibody coupling reaction was then subjected to hydrophobic interaction chromatography (HIC-HPLC). FIG. 2A shows a resulting HIC-HPLC chromatogram, in which fractions B7-C2 of the chromatogram (denoted by vertical lines) contained antibody-oligonucleotide complexes (referred to as DTX-C-008) comprising one or two DMPK ASO molecules covalently attached to DTX-A-002, as determined by SDS-PAGE. These HIC-HPLC fractions were combined and densitometry confirmed that this sample of DTX-C-008 complexes had an average ASO to antibody ratio of 1.48. SDS-PAGE analysis demonstrated that 86.4% of this sample of DTX-C-008 complexes comprised DTX-A-002 linked to either one or two DMPK ASO molecules (FIG. 2B).

[0786] Using the same methods as described above, a control complex was generated comprising the DMPK ASO used in Example 1 (control DMPK-ASO) covalently linked via a Val-Cit linker to an IgG2a (Fab) antibody (DTX-C-007).

[0787] The purified DTX-C-008 was then tested for cellular internalization and inhibition of DMPK. Hepa 1-6 cells, which have relatively high expression levels of transferrin receptor, were incubated in the presence of vehicle control, DTX-C-008 (100 nM), or DTX-C-007 (100 nM) for 72 hours. After the 72 hour incubation, the cells were isolated and assayed for expression levels of DMPK (FIG. 3). Cells treated with the DTX-C-008 demonstrated a reduction in DMPK expression by ˜65% relative to the cells treated with the vehicle control. Meanwhile, cells treated with the DTX-C-007 had DMPK expression levels comparable to the vehicle control (no reduction in DMPK expression). These data indicate that the anti-transferrin receptor antibody of the DTX-C-008 enabled cellular internalization of the complex, thereby allowing the DMPK ASO to inhibit expression of DMPK.

### Example 3: Targeting DMPK in Mouse Muscle Tissues with a Muscle-Targeting Complex

[0788] The muscle-targeting complex described in Example 2, DTX-C-008, was tested for inhibition of DMPK in mouse tissues. C57BL/6 wild-type mice were intravenously injected with a single dose of a vehicle control, control DMPK-ASO (3 mg/kg of RNA), DTX-C-008 (3 mg/kg of RNA, corresponding to 20 mg/kg antibody conjugate), or DTX-C-007 (3 mg/kg of RNA, corresponding to 20 mg/kg antibody conjugate). Control DMPK-ASO, the DMPK ASO as described in Example 1, was used as a control. Each experimental condition was replicated in three individual C57BL/6 wild-type mice. Following a seven-day period after injection, the mice were euthanized and segmented into isolated tissue types. Individual tissue samples were subsequently assayed for expression levels of DMPK (FIGS. 4A-4E and 5A-5B).

[0789] Mice treated with the DTX-C-008 complex demonstrated a reduction in DMPK expression in a variety of skeletal, cardiac, and smooth muscle tissues. For example, as shown in FIGS. 4A-4E, DMPK expression levels were significantly reduced in gastrocnemius (50% reduction), heart (30% reduction), esophagus (45% reduction), tibialis anterior (47% reduction), and soleus (31% reduction) tissues, relative to the mice treated with the vehicle control. Meanwhile, mice treated with the DTX-C-007 complex had DMPK expression levels comparable to the vehicle control (no reduction in DMPK expression) for all assayed muscle tissue types.

[0790] Mice treated with the DTX-C-008 complex demonstrated no change in DMPK expression in non-muscle tissues such as spleen and brain tissues (FIGS. 5A and 5B).

[0791] These data indicate that the anti-transferrin receptor antibody of the DTX-C-008 enabled cellular internalization of the complex into muscle-specific tissues in an in vivo mouse model, thereby allowing the DMPK ASO to inhibit expression of DMPK. These data further demonstrate that the DTX-C-008 complex is capable of specifically targeting muscle tissues.

### Example 4: Targeting DMPK in Mouse Muscle Tissues with a Muscle-Targeting Complex

[0792] The muscle-targeting complex described in Example 2, DTX-C-008, was tested for dose-dependent inhibition of DMPK in mouse tissues. C57BL/6 wild-type mice were intravenously injected with a single dose of a vehicle control (phosphate-buffered saline, PBS), control DMPK-ASO (10 mg/kg of RNA), DTX-C-008 (3 mg/kg or 10 mg/kg of RNA, wherein 3 mg/kg corresponds to 20 mg/kg antibody conjugate), or DTX-C-007 (3 mg/kg or 10 mg/kg of RNA, wherein 3 mg/kg corresponds to 20 mg/kg antibody conjugate). Control DMPK-ASO, the DMPK ASO as described in Example 1, was used as a control. Each experimental condition was replicated in five individual C57BL/6 wild-type mice. Following a seven-day period after injection, the mice were euthanized and segmented into isolated tissue types. Individual tissue samples were subsequently assayed for expression levels of DMPK (FIGS. 6A-6F).

[0793] Mice treated with the DTX-C-008 complex demonstrated a reduction in DMPK expression in a variety of skeletal muscle tissues. As shown in FIGS. 6A-6F, DMPK expression levels were significantly reduced in tibialis anterior (58% and 75% reduction for 3 mg/kg and 10 mg/kg DTX-C-008, respectively), soleus (55% and 66% reduction for 3 mg/kg and 10 mg/kg DTX-C-008, respectively), extensor digitorum longus (EDL) (52% and 72% reduction for 3 mg/kg and 10 mg/kg DTX-C-008, respectively), gastrocnemius (55% and 77% reduction for 3 mg/kg and 10 mg/kg DTX-C-008, respectively), heart (19% and 35% reduction for 3 mg/kg and 10 mg/kg DTX-C-008, respectively), and diaphragm (53% and 70% reduction for 3 mg/kg and 10 mg/kg DTX-C-008, respectively) tissues, relative to the mice treated with the vehicle control. Notably, all assayed muscle tissue types experienced dose-dependent inhibition of DMPK, with greater reduction in DMPK levels at 10 mg/kg antibody conjugate relative to 3 mg/kg antibody conjugate.

[0794] Meanwhile, mice treated with the control DTX-C-007 complex had DMPK expression levels comparable to the vehicle control (no reduction in DMPK expression) for all assayed muscle tissue types. These data indicate that the anti-transferrin receptor antibody of the DTX-C-008 enabled cellular internalization of the complex into muscle-specific tissues in an in vivo mouse model, thereby allowing the DMPK ASO to inhibit expression of DMPK. These data further demonstrate that the DTX-C-008 complex is capable of specifically targeting muscle tissues for dose-dependent inhibition of DMPK.

### Example 5: Targeting DMPK in Cynomolgus Monkey Muscle Tissues with a Muscle-Targeting Complex

[0795] A muscle-targeting complex comprising control DMPK-ASO (DTX-C-012), was generated and purified using methods described in Example 2. DTX-C-012 is a complex comprising a human anti-transferrin receptor antibody (a 15G11 antibody comprising a heavy chain comprising the amino acid sequence of SEQ ID NO: 240 and a light chain comprising the amino acid sequence of SEQ ID NO: 237) that binds to the human transferrin receptor and the cynomolgus monkey transferrin receptor, covalently linked, via a cathepsin cleavable Val-Cit linker, to control DMPK-ASO, an antisense oligonucleotide that targets DMPK. Following HIC-HPLC purification, densitometry confirmed that DTX-C-012 had an average ASO to antibody ratio of 1.32, and SDS-PAGE revealed a purity of 92.3%.

[0796] DTX-C-012 was tested for dose-dependent inhibition of DMPK in male cynomolgus monkey tissues. Male cynomolgus monkeys (19-31 months; 2-3 kg) were intravenously injected with a single dose of a saline control, control DMPK-ASO (naked DMPK ASO) (10 mg/kg of RNA), or DTX-C-012 (10 mg/kg of RNA) on Day 0. Each experimental condition was replicated in three individual male cynomolgus monkeys. On Day 7 after injection, tissue biopsies (including muscle tissues) were collected. DMPK mRNA expression levels, ASO detection assays, serum clinical chemistries, tissue histology, clinical observations, and body weights were analyzed. The monkeys were euthanized on Day 14.

[0797] Significant knockdown (KD) of DMPK mRNA expression using DTX-C-012 was observed in soleus, deep flexor, and masseter muscles relative to saline control, with 39% KD, 62% KD, and 41% KD, respectively (FIGS. 7A-7C). Robust knockdown of DMPK mRNA expression DTX-C-012 was further observed in gastrocnemius (62% KD; FIG. 7D), EDL (29% KD; FIG. 7E), tibialis anterior muscle (23% KD; FIG. 7F), diaphragm (54% KD; FIG. 7G), tongue (43% KD; FIG. 7H), heart muscle (36% KD; FIG. 7I), quadriceps (58% KD; FIG. 7J), bicep (51% KD; FIG. 7K), and deltoid muscles (47% KD; FIG. 7L). Knockdown of DMPK mRNA expression DTX-C-012 in smooth muscle was also observed in the intestine, with 63% KD at jejunum-duodenum ends (FIG. 8A) and 70% KD in ileum (FIG. 8B). Notably, naked DMPK ASO (i.e., not linked to a muscle-targeting agent), control DMPK-ASO, had minimal effects on DMPK expression levels relative to the vehicle control (i.e., little or no reduction in DMPK expression) for all assayed muscle tissue types. Monkeys treated with the DTX-C-012 complex demonstrated no change in DMPK expression in non-muscle tissues, such as liver, kidney, brain, and spleen tissues (FIGS. 9A-9D). Additional tissues were examined, as depicted in FIG. 10, which shows normalized DMPK mRNA tissue expression levels across several tissue types in cynomolgus monkeys. (N=3 male cynomolgus monkeys)

[0798] Prior to euthanization, all monkeys were tested for reticulocyte levels, platelet levels, hemoglobin expression, alanine aminotransferase (ALT) expression, aspartate aminotransferase (AST) expression, and blood urea nitrogen (BUN) levels on days 2, 7, and 14 after dosing. As shown in FIG. 12, monkeys dosed with antibody-oligonucleotide complex had normal reticulocyte levels, platelet levels, hemoglobin expression, alanine aminotransferase (ALT) expression, aspartate aminotransferase (AST) expression, and blood urea nitrogen (BUN) levels throughout the length of the experiment. These data show that a single dose of a complex comprising control DMPK-ASO is safe and tolerated in cynomolgus monkeys.

[0799] These data demonstrate that the 15G11 antibody of the DTX-C-012 complex enabled cellular internalization of the complex into muscle-specific tissues in an in vivo cynomolgus monkey model, thereby allowing the DMPK ASO (control DMPK-ASO) to inhibit expression of DMPK. These data further demonstrate that the DTX-C-012 complex is capable of specifically targeting muscle tissues for dose-dependent inhibition of DMPK without substantially impacting non-muscle tissues. This is direct contrast with the limited ability of control DMPK-ASO, a naked DMPK ASO (not linked to a muscle-targeting agent), to inhibit expression of DMPK in muscle tissues of an in vivo cynomolgus monkey model.

### Example 6: Targeting DMPK in Mouse Muscle Tissues with a Muscle-Targeting Complex

[0800] The muscle-targeting complex described in Example 2, DTX-C-008, was tested for time-dependent inhibition of DMPK in mouse tissues. C57BL/6 wild-type mice were intravenously injected with a single dose of a vehicle control (saline), control DMPK-ASO (10 mg/kg of RNA), or DTX-C-008 (10 mg/kg of RNA) and euthanized after a prescribed period of time, as described in Table 1. Following euthanization, the mice were segmented into isolated tissue types and tissue samples were subsequently assayed for expression levels of DMPK (FIGS. 11A-11B).

TABLE 1
Experimental conditions

| | | Days after injection | | Number of |
|---|---|---|---|---|
| Group | Dosage | before euthanization | | mice |
| 1 | Vehicle (saline) | 3 | days | 3 |
| 2 | Vehicle (saline) | 7 | days | 3 |
| 3 | Vehicle (saline) | 14 | days | 3 |
| 4 | Vehicle (saline) | 28 | days | 3 |
| 5 | control DMPK- | 3 | days | 3 |
| | ASO | | | |
| 6 | control DMPK- | 7 | days | 3 |
| | ASO | | | |
| 7 | control DMPK- | 14 | days | 3 |
| | ASO | | | |
| 8 | control DMPK- | 28 | days | 3 |
| | ASO | | | |
| 9 | DTX-C-008 | 3 | days | 3 |
| 10 | DTX-C-008 | 7 | days | 3 |
| 11 | DTX-C-008 | 14 | days | 3 |
| 12 | DTX-C-008 | 28 | days | 3 |

[0801] Mice treated with the DTX-C-008 complex demonstrated approximately 50% reduction in DMPK expression in gastrocnemius (FIG. 11A) and tibialis anterior (FIG. 11B) muscles for all of Groups 9-12 (3-28 days between injection and euthanization), relative to vehicle. Mice treated with the control DMPK-ASO naked oligonucleotide did not demonstrate significant reduction in DMPK expression.

[0802] These data indicate that the DTX-C-008 complex was capable of providing persistent reduction in DMPK expression for up to 28 days following dosage of mice with said DTX-C-008 complex.

### Example 7: Evaluation of Antisense Oligonucleotides that Target DMPK in Immortalized Myoblasts

[0803] Two hundred and thirty-six oligonucleotides for targeting DMPK were generated using in silico analysis. Each individual oligonucleotide was evaluated for their ability to target DMPK in cellulo at two doses—0.5 nM (low dose) and 50 nM (high dose).

[0804] Briefly, DM1 C15 immortalized myoblasts were cultured in T-75 flasks until near confluency (˜80% confluent). Myoblasts were then disrupted with trypsin and seeded into 96-well microplates at a density of 50,000 cells/well. Cells were allowed to recover overnight before the growth media was washed out and replaced with a no-serum media to induce differentiation into myotubes. Differentiation proceeded for seven days prior to treatment with DMPK-targeting oligonucleotides.

[0805] On day seven following induction of differentiation, DM1 C15 myotubes were transfected with an individual oligonucleotide using 0.3 μL of Lipofectamine MessengerMax per well. All oligonucleotides were tested at both 0.5 nM and 50 nM final concentrations in biological triplicates. After treatment with oligonucleotides, cells were incubated for 72 hours prior to being harvested for total RNA. cDNA was synthesized from the total RNA extracts and qPCR was performed to determine expression levels of DMPK in technical quadruplicate. All qPCR data were analyzed using a traditional MET method and were normalized to a plate-based negative control that comprised cells treated with vehicle control (0.3 μL/well Lipofectamine MessengerMax without any oligonucleotide). Results from these experiments are shown in Table 10. ‘Normalized DMPK Remaining’ for each antisense oligonucleotide in Table 10 refers to the expression level of DMPK in cell treated with said antisense oligonucleotide relative to the negative control that comprised cells treated with vehicle control (wherein the expression level of the negative control has been normalized to equal 1.00)

[0806] The majority of tested DMPK-targeting antisense oligonucleotides demonstrated a reduction in DMPK expression in differentiated myotubes at both the low and high dose concentrations (0.5 nM and 50 nM, respectively). These data demonstrate that the antisense oligonucleotides shown in Table 10 are capable of targeting DMPK in cellulo, suggesting that muscle-targeting complexes comprising these antisense oligonucleotides would be capable of targeting DMPK in muscle tissues in vivo.

TABLE 10
Ability ofDMPK-targeting antisense oligonucleotides to reduce expression of
DMPK in cellulo

| | | | | 0.5 nM | | 50 nM | |
|---|---|---|---|---|---|---|---|
| Antisense | SEQ | | SEQ | Normalized | Percent | Normalized | Percent |
| Oligonucleotide | NO: | DMPK Target | NO: | DMPK | DMPK | DMPK | DMPK |
| Sequence | ID | Sequence | ID | Remaining | Reduction | Remaining | Reduction |
| GGACGGCCCGGC | 246 | GGCAGCAAGCCG | 482 | 0.42 | 58.25 | 0.31 | 69.30 |
| UUGCUGCC | | GGCCGTCC | | | | | |
| GGGCCCGGAUCA | 247 | CAGTCCTGTGATC | 483 | 0.42 | 57.97 | 0.38 | 61.96 |
| CAGGACUG | | CGGGCCC | | | | | |
| CAAACUUGCUCA | 248 | GACACTGCTGAG | 484 | 0.69 | 31.45 | 0.46 | 53.93 |
| GCAGUGUC | | CAAGTTTG | | | | | |
| AAACUUGCUCAG | 249 | TGACACTGCTGA | 485 | 0.69 | 30.85 | 0.49 | 50.69 |
| CAGUGUCA | | GCAAGTTT | | | | | |
| CGGAUGGCCUCC | 250 | CGGGAGATGGAG | 486 | 0.71 | 28.92 | 0.44 | 55.57 |
| AUCUCCCG | | GCCATCCG | | | | | |
| CUCGGCCGGAAU | 251 | GGGAGCGGATTC | 487 | 0.71 | 28.64 | 0.35 | 64.75 |
| CCGCUCCC | | CGGCCGAG | | | | | |
| UCUCGGCCGGAA | 252 | GGAGCGGATTCC | 488 | 0.72 | 27.88 | 0.33 | 67.46 |
| UCCGCUCC | | GGCCGAGA | | | | | |
| UGCUCAGCAGUG | 253 | CCTGCTGACACTG | 489 | 0.73 | 27.08 | 0.34 | 65.78 |
| UCAGCAGG | | CTGAGCA | | | | | |
| UUGUCGGGUUUG | 254 | AGGGACATCAAA | 490 | 0.66 | 34.16 | 0.44 | 55.56 |
| AUGUCCCU | | CCCGACAA | | | | | |
| GUUGCGGGUUUG | 255 | GGGACATCAAAC | 491 | 0.67 | 33.31 | 0.39 | 61.07 |
| AUGUCCC | | CCGACAAC | | | | | |
| UCCGCCAGGUAG | 256 | GCGCGCTTCTACC | 492 | 0.72 | 27.99 | 0.20 | 80.06 |
| AAGCGCGC | | TGGCGGA | | | | | |
| CAUGGCAUACAC | 257 | CGGGCCAGGTGT | 493 | 0.68 | 31.63 | 0.26 | 74.03 |
| CUGGCCCG | | ATGCCATG | | | | | |
| AACUUGCUCAGC | 258 | CTGACACTGCTG | 494 | 0.80 | 19.81 | 0.47 | 52.64 |
| AGUGUCAG | | AGCAAGTT | | | | | |
| CAGCUGCGUGAU | 259 | GGCGGTGGATCA | 495 | 0.81 | 19.03 | 0.32 | 68.34 |
| CCACCGCC | | CGCAGCTG | | | | | |
| CGAAUGUCCGAC | 260 | GAGACACTGTCG | 496 | 0.60 | 40.21 | 0.36 | 64.42 |
| AGUGUCUC | | GACATTCG | | | | | |
| GAAGUCGGCCAG | 261 | ACATCCGCCTGG | 497 | 0.82 | 18.36 | 0.56 | 44.04 |
| GCGGAUGU | | CCGACTTC | | | | | |
| UGUCGGGUUUGA | 262 | CAGGGACATCAA | 498 | 0.70 | 30.09 | 0.32 | 68.14 |
| UGUCCCUG | | ACCCGACA | | | | | |
| GGAUGGCCUCCA | 263 | CCGGGAGATGGA | 499 | 0.75 | 24.93 | 0.39 | 60.77 |
| UCUCCCGG | | GGCCATCC | | | | | |
| AGGAUGUUGUCG | 264 | ATCAAACCCGAC | 500 | 0.76 | 24.19 | 0.61 | 39.48 |
| GGUUUGAU | | AACATCCT | | | | | |
| GUCGGGUUUGAU | 265 | ACAGGGACATCA | 501 | 0.71 | 28.89 | 0.36 | 64.15 |
| GUCCCUGU | | AACCCGAC | | | | | |
| AAUACUCCAUGA | 266 | GTACCTGGTCATG | 502 | 0.71 | 28.86 | 0.48 | 52.07 |
| CCAGGUAC | | GAGTATT | | | | | |
| CUUGUUCAUGAU | 267 | CCATGAAGATCA | 503 | 0.84 | 16.06 | 0.51 | 49.47 |
| CUUCAUGG | | TGAACAAG | | | | | |
| UCAGUGCAUCCA | 268 | CCACGTTTTGGAT | 504 | 0.84 | 15.76 | 0.58 | 42.06 |
| AAACGUGG | | GCACTGA | | | | | |
| CUGUCCCGGAGA | 269 | TGGGATGGTCTCC | 505 | 0.64 | 35.85 | 0.49 | 50.78 |
| CCAUCCCA | | GGGACAG | | | | | |
| GGGCCUGGGACC | 270 | GACAGTGAGGTC | 506 | 0.63 | 37.19 | 0.23 | 76.81 |
| UCACUGUC | | CCAGGCCC | | | | | |
| CCCACGUAAUAC | 271 | GTCATGGAGTATT | 507 | 0.72 | 28.21 | 0.54 | 45.94 |
| UCCAUGAC | | ACGTGGG | | | | | |
| CUCUGCCGCAGG | 272 | CGGCTGTCCCTGC | 508 | 0.63 | 37.09 | 0.06 | 93.59 |
| GACAGCCG | | GGCAGAG | | | | | |
| CUGUGCACGUAG | 273 | CGGCTTGGCTAC | 509 | 0.74 | 25.67 | 0.30 | 70.10 |
| CCAAGCCG | | GTGCACAG | | | | | |
| UGCCCAUCCACG | 274 | GGCCCTGACGTG | 510 | 0.86 | 13.63 | 0.67 | 33.09 |
| UCAGGGCC | | GATGGGCA | | | | | |
| AGCGCCUCCGAU | 275 | CCTGGCCTATCGG | 511 | 0.79 | 21.19 | 0.38 | 61.91 |
| AGGCCAGG | | AGGCGCT | | | | | |
| UGUGCACGUAGC | 276 | CCGGCTTGGCTAC | 512 | 0.75 | 24.74 | 0.25 | 75.09 |
| CAAGCCGG | | GTGCACA | | | | | |
| GACCAGGUACAG | 277 | AGAACTACCTGT | 513 | 0.57 | 42.85 | 0.29 | 70.95 |
| GUAGUUCU | | ACCTGGTC | | | | | |
| CCAUCUCGGCCG | 278 | GCGGATTCCGGC | 514 | 0.79 | 20.50 | 0.40 | 59.76 |
| GAAUCCGC | | CGAGATGG | | | | | |
| CAUCUCGGCCGG | 279 | AGCGGATTCCGG | 515 | 0.80 | 20.21 | 0.41 | 59.40 |
| AAUCCGCU | | CCGAGATG | | | | | |
| UUGCCAUAGGUC | 280 | ACGGCGGAGACC | 516 | 0.64 | 36.30 | 0.40 | 60.12 |
| UCCGCCGU | | TATGGCAA | | | | | |
| ACAGCGGUCCAG | 281 | ACATCCTGCTGG | 517 | 0.80 | 19.94 | 0.45 | 55.14 |
| CAGGAUGU | | ACCGCTGT | | | | | |
| AAAGCGCCUCCG | 282 | TGGCCTATCGGA | 518 | 0.80 | 19.89 | 0.38 | 62.04 |
| AUAGGCCA | | GGCGCTTT | | | | | |
| GCCAAAGAAGAA | 283 | CACATCCCTTCTT | 519 | 0.75 | 24.87 | 0.44 | 56.19 |
| GGGAUGUG | | CTTTGGC | | | | | |
| CACGUAAUACUC | 284 | TGGTCATGGAGT | 520 | 0.76 | 24.40 | 0.54 | 46.50 |
| CAUGACCA | | ATTACGTG | | | | | |
| AUCUCGGCCGGA | 285 | GAGCGGATTCCG | 521 | 0.88 | 11.61 | 0.34 | 65.98 |
| AUCCGCUC | | GCCGAGAT | | | | | |
| GCUUCAUCUUCA | 286 | AGCGGTAGTGAA | 522 | 0.69 | 31.44 | 0.48 | 51.78 |
| CUACCGCU | | GATGAAGC | | | | | |
| GCCAUCUCGGCC | 287 | CGGATTCCGGCC | 523 | 0.81 | 18.56 | 0.14 | 86.39 |
| GGAAUCCG | | GAGATGGC | | | | | |
| CAGGGACAGCCG | 288 | AGTTCCAGCGGC | 524 | 0.68 | 32.09 | 0.41 | 58.84 |
| CUGGAACU | | TGTCCCTG | | | | | |
| AUGACAAUCUCC | 289 | TACCTGGCGGAG | 525 | 0.58 | 42.38 | 0.40 | 60.47 |
| GCCAGGUA | | ATTGTCAT | | | | | |
| GGCCAUGACAAU | 290 | TGGCGGAGATTG | 526 | 0.58 | 42.38 | 0.25 | 75.00 |
| CUCCGCCA | | TCATGGCC | | | | | |
| AUACUCCAUGAC | 291 | TGTACCTGGTCAT | 527 | 0.77 | 23.07 | 0.43 | 56.84 |
| CAGGUACA | | GGAGTAT | | | | | |
| GCCUCUGCCUCG | 292 | CAACTACGCGAG | 528 | 0.65 | 35.38 | 0.19 | 81.18 |
| CGUAGUUG | | GCAGAGGC | | | | | |
| GAAUGUCCGACA | 293 | GGAGACACTGTC | 529 | 0.70 | 30.09 | 0.37 | 63.41 |
| GUGUCUCC | | GGACATTC | | | | | |
| CGUUCCAUCUGC | 294 | AGCTGCGGGCAG | 530 | 0.66 | 33.74 | 0.31 | 68.72 |
| CCGCAGCU | | ATGGAACG | | | | | |
| CCUUGUAGUGGA | 295 | CAAGATCGTCCA | 531 | 0.83 | 17.20 | 0.34 | 65.91 |
| CGAUCUUG | | CTACAAGG | | | | | |
| AUCUCCGCCAGG | 296 | CGCTTCTACCTGG | 532 | 0.58 | 42.37 | 0.35 | 65.50 |
| UAGAAGCG | | CGGAGAT | | | | | |
| CUCAGGCUCUGC | 297 | CTCACCCGGCAG | 533 | 0.70 | 30.13 | 0.37 | 63.07 |
| CGGGUGAG | | AGCCTGAG | | | | | |
| UGCUUCAUCUUC | 298 | GCGGTAGTGAAG | 534 | 0.71 | 28.82 | 0.40 | 60.24 |
| ACUACCGC | | ATGAAGCA | | | | | |
| GCAGGAUGUUGU | 299 | CAAACCCGACAA | 535 | 0.56 | 44.39 | 0.22 | 78.03 |
| CGGGUUUG | | CATCCTGC | | | | | |
| GGCCUCAGCCUC | 300 | CTGCGGCAGAGG | 536 | 0.80 | 20.12 | 0.29 | 71.28 |
| UGCCGCAG | | CTGAGGCC | | | | | |
| UGUUGUCGGGUU | 301 | GGACATCAAACC | 537 | 0.79 | 21.00 | 0.58 | 42.19 |
| UGAUGUCC | | CGACAACA | | | | | |
| CCACGUAAUACU | 302 | GGTCATGGAGTA | 538 | 0.79 | 20.84 | 0.50 | 50.06 |
| CCAUGACC | | TTACGTGG | | | | | |
| CCGUUCCAUCUG | 303 | GCTGCGGGCAGA | 539 | 0.68 | 31.74 | 0.23 | 77.46 |
| CCCGCAGC | | TGGAACGG | | | | | |
| UUCCCGAGUAAG | 304 | TCTGCCTGCTTAC | 540 | 0.69 | 31.49 | 0.50 | 49.81 |
| CAGGCAGA | | TCGGGAA | | | | | |
| UGAUCUUCAUGG | 305 | GGTGTATGCCAT | 541 | 0.72 | 27.70 | 0.10 | 89.68 |
| CAUACACC | | GAAGATCA | | | | | |
| AGGGACAGCCGC | 306 | CAGTTCCAGCGG | 542 | 0.71 | 28.72 | 0.55 | 45.34 |
| UGGAACTG | | CTGTCCCT | | | | | |
| GGGUUUGAUGUC | 307 | TGCACAGGGACA | 543 | 0.60 | 40.12 | 0.37 | 62.61 |
| CCUGUGCA | | TCAAACCC | | | | | |
| UGACAAUCUCCG | 308 | CTACCTGGCGGA | 544 | 0.61 | 38.86 | 0.33 | 66.56 |
| CCAGGUAG | | GATTGTCA | | | | | |
| CACAGCGGUCCA | 309 | CATCCTGCTGGAC | 545 | 0.93 | 6.62 | 0.40 | 59.58 |
| GCAGGAUG | | CGCTGTG | | | | | |
| GCGUAGAAGGGC | 310 | GGGCAGACGCCC | 546 | 0.60 | 39.53 | 0.22 | 77.91 |
| GUCUGCCC | | TTCTACGC | | | | | |
| CUCAGCCUCUGC | 311 | TCCCTGCGGCAG | 547 | 0.82 | 17.86 | 0.20 | 79.58 |
| CGCAGGGA | | AGGCTGAG | | | | | |
| GUCUCAGUGCAU | 312 | CGTTTTGGATGCA | 548 | 0.81 | 18.85 | 0.54 | 46.13 |
| CCAAAACG | | CTGAGAC | | | | | |
| GGACGAUCUUGC | 313 | GACCTATGGCAA | 549 | 0.70 | 29.82 | 0.51 | 48.97 |
| CAUAGGUC | | GATCGTCC | | | | | |
| UCAGCAGUGUCA | 314 | GGACCTGCTGAC | 550 | 0.67 | 33.46 | 0.39 | 61.11 |
| GCAGGUCC | | ACTGCTGA | | | | | |
| GCUCCUGGGCGG | 315 | GTCTGGCGCCGC | 551 | 0.91 | 8.52 | 0.21 | 78.79 |
| CGCCAGAC | | CCAGGAGC | | | | | |
| AGCAGGAUGUUG | 316 | AAACCCGACAAC | 552 | 0.59 | 41.05 | 0.26 | 74.02 |
| UCGGGUUU | | ATCCTGCT | | | | | |
| AUCCGCUCCUGC | 317 | CGGCAGTTGCAG | 553 | 0.87 | 12.80 | 0.60 | 40.06 |
| AACUGCCG | | GAGCGGAT | | | | | |
| AGGAGCAGGGAA | 318 | GAGGCGCTTTCCC | 554 | 0.67 | 33.24 | 0.38 | 62.37 |
| AGCGCCUC | | TGCTCCT | | | | | |
| ACACCUGGCCCG | 319 | GAAGCAGACGGG | 555 | 0.67 | 33.00 | 0.45 | 55.40 |
| UCUGCUUC | | CCAGGTGT | | | | | |
| CCCAGCGCCCAC | 320 | TGTGACTGGTGG | 556 | 0.62 | 37.93 | 0.32 | 67.82 |
| CAGUCACA | | GCGCTGGG | | | | | |
| GCUCCCUCUGCC | 321 | TTGCTGCAGGCA | 557 | 0.74 | 26.41 | 0.30 | 70.15 |
| UGCAGCAA | | GAGGGAGC | | | | | |
| GCUCAGGCUCUG | 322 | TCACCCGGCAGA | 558 | 0.74 | 25.69 | 0.39 | 60.71 |
| CCGGGUGA | | GCCTGAGC | | | | | |
| UUGAUGUCCCUG | 323 | TACGTGCACAGG | 559 | 0.74 | 25.67 | 0.45 | 55.13 |
| UGCACGUA | | GACATCAA | | | | | |
| GCCUCAGCCUCU | 324 | CCTGCGGCAGAG | 560 | 0.84 | 16.37 | 0.54 | 46.42 |
| GCCGCAGG | | GCTGAGGC | | | | | |
| GGUAGUUCUCAU | 325 | CTTCCAGGATGA | 561 | 0.75 | 25.48 | 0.44 | 56.15 |
| CCUGGAAG | | GAACTACC | | | | | |
| CAGCGCCCACCA | 326 | AGTGTGACTGGT | 562 | 0.63 | 37.28 | 0.35 | 64.93 |
| GUCACACU | | GGGCGCTG | | | | | |
| CCCAAACUUGCU | 327 | CACTGCTGAGCA | 563 | 0.63 | 37.02 | 0.38 | 61.78 |
| CAGCAGUG | | AGTTTGGG | | | | | |
| CUUGCCAUAGGU | 328 | CGGCGGAGACCT | 564 | 0.73 | 27.04 | 0.29 | 71.05 |
| CUCCGCCG | | ATGGCAAG | | | | | |
| UACACCUGGCCC | 329 | AAGCAGACGGGC | 565 | 0.69 | 31.10 | 0.43 | 57.43 |
| GUCUGCUU | | CAGGTGTA | | | | | |
| CCAGCGCCCACC | 330 | GTGTGACTGGTG | 566 | 0.64 | 36.17 | 0.29 | 70.96 |
| AGUCACAC | | GGCGCTGG | | | | | |
| GGCCUCAGCCUG | 331 | CTTTCGGCCAGGC | 567 | 0.86 | 14.49 | 0.35 | 64.80 |
| GCCGAAAG | | TGAGGCC | | | | | |
| AAUCUCCGCCAG | 332 | GCTTCTACCTGGC | 568 | 0.64 | 35.85 | 0.35 | 65.27 |
| GUAGAAGC | | GGAGATT | | | | | |
| AUGGCAUACACC | 333 | ACGGGCCAGGTG | 569 | 0.86 | 14.31 | 0.50 | 49.63 |
| UGGCCCGU | | TATGCCAT | | | | | |
| CCAUGACAAUCU | 334 | CCTGGCGGAGAT | 570 | 0.65 | 34.53 | 0.24 | 76.46 |
| CCGCCAGG | | TGTCATGG | | | | | |
| UCCCCAAACUUG | 335 | CTGCTGAGCAAG | 571 | 0.94 | 5.73 | 0.55 | 44.67 |
| CUCAGCAG | | TTTGGGGA | | | | | |
| GAUGUUGUCGGG | 336 | ACATCAAACCCG | 572 | 0.90 | 10.06 | 0.58 | 42.42 |
| UUUGAUGU | | ACAACATC | | | | | |
| GUUUGCCCAUCC | 337 | CCTGACGTGGAT | 573 | 0.66 | 34.36 | 0.46 | 54.49 |
| ACGUCAGG | | GGGCAAAC | | | | | |
| CGGACGGCCCGG | 338 | GCAGCAAGCCGG | 574 | 0.95 | 5.42 | 0.70 | 30.41 |
| CUUGCUGC | | GCCGTCCG | | | | | |
| CUCCGCCAGGUA | 339 | CGCGCTTCTACCT | 575 | 0.70 | 30.22 | 0.22 | 78.14 |
| GAAGCGCG | | GGCGGAG | | | | | |
| GUACAGGUAGUU | 340 | AGGATGAGAACT | 576 | 0.68 | 31.52 | 0.34 | 65.57 |
| CUCAUCCU | | ACCTGTAC | | | | | |
| AGGGCGUCUGCC | 341 | GTTCTATGGGCA | 577 | 0.87 | 13.23 | 0.41 | 58.98 |
| CAUAGAAC | | GACGCCCT | | | | | |
| UGGCCACAGCGG | 342 | CTGCTGGACCGCT | 578 | 0.70 | 29.59 | 0.31 | 69.44 |
| UCCAGCAG | | GTGGCCA | | | | | |
| CGUAGUUGACUG | 343 | AACTTCGCCAGTC | 579 | 0.75 | 25.26 | 0.38 | 61.52 |
| GCGAAGUU | | AACTACG | | | | | |
| UCUGCCGCAGGG | 344 | GCGGCTGTCCCTG | 580 | 0.77 | 22.97 | 0.18 | 82.10 |
| ACAGCCGC | | CGGCAGA | | | | | |
| AAGCGCCUCCGA | 345 | CTGGCCTATCGG | 581 | 0.91 | 8.91 | 0.56 | 43.93 |
| UAGGCCAG | | AGGCGCTT | | | | | |
| GACAGAACAACG | 346 | CTGTTCGCCGTTG | 582 | 0.79 | 21.41 | 0.30 | 70.49 |
| GCGAACAG | | TTCTGTC | | | | | |
| GCUCAGCAGUGU | 347 | ACCTGCTGACACT | 583 | 0.71 | 29.18 | 0.27 | 73.46 |
| CAGCAGGU | | GCTGAGC | | | | | |
| AUGAUCUUCAUG | 348 | GTGTATGCCATG | 584 | 0.87 | 12.76 | 0.60 | 39.97 |
| GCAUACAC | | AAGATCAT | | | | | |
| UUUGCCCAUCCA | 349 | CCCTGACGTGGA | 585 | 0.67 | 32.79 | 0.41 | 59.36 |
| CGUCAGGG | | TGGGCAAA | | | | | |
| ACUUGCUCAGCA | 350 | GCTGACACTGCT | 586 | 0.72 | 27.84 | 0.39 | 60.71 |
| GUGUCAGC | | GAGCAAGT | | | | | |
| UGAUGUCCCUGU | 351 | CTACGTGCACAG | 587 | 0.79 | 20.58 | 0.41 | 59.00 |
| GCACGUAG | | GGACATCA | | | | | |
| AAAUACCGAGGA | 352 | CCCGACATTCCTC | 588 | 0.89 | 11.25 | 0.49 | 50.91 |
| AUGUCGGG | | GGTATTT | | | | | |
| GGCGAAUACACC | 353 | GGGCGCTGGGTG | 589 | 0.80 | 19.77 | 0.31 | 68.72 |
| CAGCGCCC | | TATTCGCC | | | | | |
| AGACAAUAAAUA | 354 | TTCCTCGGTATTT | 590 | 0.71 | 29.37 | 0.52 | 48.20 |
| CCGAGGAA | | ATTGTCT | | | | | |
| CCCGUCUGCUUC | 355 | GTGAAGATGAAG | 591 | 0.80 | 20.31 | 0.56 | 43.97 |
| AUCUUCAC | | CAGACGGG | | | | | |
| CUGCCUGCAGCA | 356 | GATGGAGTTGCT | 592 | 0.77 | 23.10 | 0.53 | 46.69 |
| ACUCCAUC | | GCAGGCAG | | | | | |
| CCUCAGCCUCUG | 357 | CCCTGCGGCAGA | 593 | 0.89 | 10.87 | 0.45 | 55.22 |
| CCGCAGGG | | GGCTGAGG | | | | | |
| GUGUCCGGAAGU | 358 | AGCAGGCGACTT | 594 | 0.77 | 22.99 | 0.26 | 73.65 |
| CGCCUGCU | | CCGGACAC | | | | | |
| UGCACGUGUGGC | 359 | CTGCTTGAGCCAC | 595 | 0.89 | 10.81 | 0.36 | 64.18 |
| UCAAGCAG | | ACGTGCA | | | | | |
| GACAAUAAAUAC | 360 | ATTCCTCGGTATT | 596 | 0.71 | 28.97 | 0.52 | 47.51 |
| CGAGGAAU | | TATTGTC | | | | | |
| GCCAUGACAAUC | 361 | CTGGCGGAGATT | 597 | 0.69 | 30.96 | 0.19 | 81.00 |
| UCCGCCAG | | GTCATGGC | | | | | |
| GCUGUCCCGGAG | 362 | GGGATGGTCTCC | 598 | 0.77 | 22.57 | 0.34 | 66.27 |
| ACCAUCCC | | GGGACAGC | | | | | |
| CAUGACCAGGUA | 363 | ACTACCTGTACCT | 599 | 0.81 | 19.39 | 0.41 | 59.09 |
| CAGGUAGU | | GGTCATG | | | | | |
| AGCGCCCACCAG | 364 | GAGTGTGACTGG | 600 | 0.70 | 30.36 | 0.36 | 63.67 |
| UCACACUC | | TGGGCGCT | | | | | |
| UCUCAGUGCAUC | 365 | ACGTTTTGGATGC | 601 | 0.89 | 10.88 | 0.49 | 51.34 |
| CAAAACGU | | ACTGAGA | | | | | |
| UUUGGGCAGAUG | 366 | AGGCCCTCCATCT | 602 | 0.65 | 35.14 | 0.30 | 70.00 |
| GAGGGCCU | | GCCCAAA | | | | | |
| GAUGUCCCUGUG | 367 | GCTACGTGCACA | 603 | 0.81 | 18.99 | 0.38 | 62.46 |
| CACGUAGC | | GGGACATC | | | | | |
| CAGCAGUGUCAG | 368 | GGGACCTGCTGA | 604 | 0.74 | 25.67 | 0.48 | 51.97 |
| CAGGUCCC | | CACTGCTG | | | | | |
| CAUGACAAUCUC | 369 | ACCTGGCGGAGA | 605 | 0.71 | 29.45 | 0.29 | 70.52 |
| CGCCAGGU | | TTGTCATG | | | | | |
| ACUUGUUCAUGA | 370 | CATGAAGATCAT | 606 | 0.75 | 25.47 | 0.47 | 52.89 |
| UCUUCAUG | | GAACAAGT | | | | | |
| GUGGAAUCCGCG | 371 | CCCTTCTACGCGG | 607 | 0.69 | 30.55 | 0.51 | 49.34 |
| UAGAAGGG | | ATTCCAC | | | | | |
| UGGCCAUGACAA | 372 | GGCGGAGATTGT | 608 | 0.70 | 30.46 | 0.27 | 72.55 |
| UCUCCGCC | | CATGGCCA | | | | | |
| GGGACAGACAAU | 373 | CGGTATTTATTGT | 609 | 0.73 | 27.19 | 0.49 | 50.50 |
| AAAUACCG | | CTGTCCC | | | | | |
| CCGCUCCCCAAA | 374 | TGAGCAAGTTTG | 610 | 1.00 | 0.28 | 0.43 | 56.82 |
| CUUGCUCA | | GGGAGCGG | | | | | |
| CGGCUCAGGCUC | 375 | ACCCGGCAGAGC | 611 | 0.82 | 17.97 | 0.31 | 69.03 |
| UGCCGGGU | | CTGAGCCG | | | | | |
| GGCUCCUGGGCG | 376 | TCTGGCGCCGCCC | 612 | 1.00 | 0.05 | 0.04 | 96.23 |
| GCGCCAGA | | AGGAGCC | | | | | |
| UUUCCCGAGUAA | 377 | CTGCCTGCTTACT | 613 | 0.79 | 20.69 | 0.55 | 44.89 |
| GCAGGCAG | | CGGGAAA | | | | | |
| GGAUGUUGUCGG | 378 | CATCAAACCCGA | 614 | 0.96 | 4.26 | 0.59 | 40.81 |
| GUUUGAUG | | CAACATCC | | | | | |
| CAGGUAGUUCUC | 379 | TCCAGGATGAGA | 615 | 0.74 | 25.92 | 0.23 | 76.71 |
| AUCCUGGA | | ACTACCTG | | | | | |
| UGCCCAUAGAAC | 380 | TATGAAATGTTCT | 616 | 0.92 | 7.67 | 0.65 | 34.56 |
| AUUUCAUA | | ATGGGCA | | | | | |
| UAGUUCUCAUCC | 381 | GCCTTCCAGGAT | 617 | 0.83 | 16.83 | 0.56 | 43.88 |
| UGGAAGGC | | GAGAACTA | | | | | |
| AUGUCCCUGUGC | 382 | GGCTACGTGCAC | 618 | 0.83 | 16.78 | 0.51 | 49.29 |
| ACGUAGCC | | AGGGACAT | | | | | |
| CGGGCCCGGAUC | 383 | AGTCCTGTGATCC | 619 | 0.83 | 17.45 | 0.33 | 67.11 |
| ACAGGACU | | GGGCCCG | | | | | |
| UGGACGAUCUUG | 384 | ACCTATGGCAAG | 620 | 0.81 | 19.20 | 0.57 | 42.52 |
| CCAUAGGU | | ATCGTCCA | | | | | |
| GUUGGCCGGCGU | 385 | GGTGGCCCACGC | 621 | 1.02 | -1.82 | 0.56 | 43.57 |
| GGGCCACC | | CGGCCAAC | | | | | |
| CUCAGUGCAUCC | 386 | CACGTTTTGGATG | 622 | 0.92 | 7.65 | 0.46 | 54.26 |
| AAAACGUG | | CACTGAG | | | | | |
| UCGAAGUUGCAU | 387 | ACCGACACATGC | 623 | 0.77 | 22.96 | 0.42 | 58.15 |
| GUGUCGGU | | AACTTCGA | | | | | |
| UGGAACACGGAC | 388 | GCCGGGCCGTCC | 624 | 1.02 | -1.90 | 0.39 | 60.96 |
| GGCCCGGC | | GTGTTCCA | | | | | |
| CCGAGAGCAGCG | 389 | CTCACTTGCGCTG | 625 | 0.84 | 16.13 | 0.59 | 40.93 |
| CAAGUGAG | | CTCTCGG | | | | | |
| UCCUGCAACUGC | 390 | CACGTCCGGCAG | 626 | 0.84 | 16.06 | 0.55 | 44.61 |
| CGGACGUG | | TTGCAGGA | | | | | |
| UCACCAACACGU | 391 | GGAGAGGGACGT | 627 | 0.53 | 47.12 | 0.16 | 84.09 |
| CCCUCUCC | | GTTGGTGA | | | | | |
| UGCCUGCAGCAA | 392 | GGATGGAGTTGC | 628 | 0.86 | 13.99 | 0.50 | 49.75 |
| CUCCAUCC | | TGCAGGCA | | | | | |
| UUGGCCGGCGUG | 393 | TGGTGGCCCACG | 629 | 1.03 | -3.19 | 0.56 | 44.37 |
| GGCCACCA | | CCGGCCAA | | | | | |
| GAGCCUCUGCCU | 394 | ACTACGCGAGGC | 630 | 0.81 | 18.77 | 0.22 | 77.78 |
| CGCGUAGU | | AGAGGCTC | | | | | |
| AAGGGCGUCUGC | 395 | TTCTATGGGCAG | 631 | 0.87 | 13.15 | 0.65 | 34.56 |
| CCAUAGAA | | ACGCCCTT | | | | | |
| ACAGACAAUAAA | 396 | CCTCGGTATTTAT | 632 | 1.04 | -3.95 | 0.26 | 74.02 |
| UACCGAGG | | TGTCTGT | | | | | |
| GGACAGACAAUA | 397 | TCGGTATTTATTG | 633 | 0.77 | 22.57 | 0.47 | 52.51 |
| AAUACCGA | | TCTGTCC | | | | | |
| ACGUGUGCCUCU | 398 | CGGGACCTAGAG | 634 | 0.84 | 16.47 | 0.22 | 77.73 |
| AGGUCCCG | | GCACACGT | | | | | |
| GGCACGAGACAG | 399 | CCGTTGTTCTGTC | 635 | 0.84 | 16.10 | 0.32 | 68.01 |
| AACAACGG | | TCGTGCC | | | | | |
| UGACCAGGUACA | 400 | GAACTACCTGTA | 636 | 0.78 | 22.00 | 0.36 | 63.73 |
| GGUAGUUC | | CCTGGTCA | | | | | |
| CUCUGCCGGGUG | 401 | GAGGTGCTCACC | 637 | 0.75 | 25.25 | 0.26 | 74.36 |
| AGCACCUC | | CGGCAGAG | | | | | |
| GACAAUCUCCGC | 402 | TCTACCTGGCGG | 638 | 0.76 | 23.70 | 0.50 | 49.82 |
| CAGGUAGA | | AGATTGTC | | | | | |
| UCUCCGCCAGGU | 403 | GCGCTTCTACCTG | 639 | 0.80 | 19.59 | 0.33 | 66.52 |
| AGAAGCGC | | GCGGAGA | | | | | |
| CUCUGCCUCGCG | 404 | GTCAACTACGCG | 640 | 0.83 | 16.61 | 0.09 | 91.21 |
| UAGUUGAC | | AGGCAGAG | | | | | |
| CUUUGGGCAGAU | 405 | GGCCCTCCATCTG | 641 | 0.72 | 28.06 | 0.33 | 67.50 |
| GGAGGGCC | | CCCAAAG | | | | | |
| ACAGGUAGUUCU | 406 | CCAGGATGAGAA | 642 | 0.79 | 20.51 | 0.15 | 85.36 |
| CAUCCUGG | | CTACCTGT | | | | | |
| CCAAACUUGCTC | 407 | ACACTGCTGAGC | 643 | 0.76 | 23.64 | 0.42 | 57.70 |
| AGCAGUGU | | AAGTTTGG | | | | | |
| UCGGGUUUGAUG | 408 | CACAGGGACATC | 644 | 0.78 | 22.49 | 0.43 | 57.16 |
| UCCCUGUG | | AAACCCGA | | | | | |
| GGCUUGCUGCCU | 409 | GCCTGGGAAGGC | 645 | 1.06 | -6.32 | 0.52 | 48.15 |
| UCCCAGGC | | AGCAAGCC | | | | | |
| UACAGGUAGUUC | 410 | CAGGATGAGAAC | 646 | 0.80 | 19.83 | 0.27 | 72.51 |
| UCAUCCUG | | TACCTGTA | | | | | |
| UUGCCCAUCCAC | 411 | GCCCTGACGTGG | 647 | 0.78 | 22.23 | 0.33 | 67.15 |
| GUCAGGGC | | ATGGGCAA | | | | | |
| AGGUACAGGUAG | 412 | GATGAGAACTAC | 648 | 0.81 | 18.68 | 0.41 | 58.92 |
| UUCUCAUC | | CTGTACCT | | | | | |
| GACAGACAAUAA | 413 | CTCGGTATTTATT | 649 | 0.82 | 18.26 | 0.62 | 38.07 |
| AUACCGAG | | GTCTGTC | | | | | |
| UAGAACAUUUCA | 414 | TTCGCCTATGAAA | 650 | 0.80 | 20.23 | 0.56 | 43.67 |
| UAGGCGAA | | TGTTCTA | | | | | |
| AGGGCCUUUUAU | 415 | CCTCGCGAATAA | 651 | 0.86 | 13.63 | 0.34 | 66.43 |
| UCGCGAGG | | AAGGCCCT | | | | | |
| GCCUCGCGUAGU | 416 | GCCAGTCAACTA | 652 | 0.87 | 12.98 | 0.09 | 91.10 |
| UGACUGGC | | CGCGAGGC | | | | | |
| CCAGCAGGAUGU | 417 | ACCCGACAACAT | 653 | 0.60 | 40.29 | 0.10 | 89.59 |
| UGUCGGGU | | CCTGCTGG | | | | | |
| GUAGUUGACUGG | 418 | GAACTTCGCCAG | 654 | 0.93 | 7.50 | 0.55 | 45.33 |
| CGAAGUUC | | TCAACTAC | | | | | |
| UGCGGAUGGCCU | 419 | GGAGATGGAGGC | 655 | 0.60 | 40.15 | 0.16 | 84.43 |
| CCAUCUCC | | CATCCGCA | | | | | |
| ACAAUCUCCGCC | 420 | TTCTACCTGGCGG | 656 | 0.81 | 19.09 | 0.50 | 49.75 |
| AGGUAGAA | | AGATTGT | | | | | |
| GCGAAUACACCC | 421 | TGGGCGCTGGGT | 657 | 0.93 | 6.94 | 0.30 | 69.72 |
| AGCGCCCA | | GTATTCGC | | | | | |
| GUAGUUCUCAUC | 422 | CCTTCCAGGATG | 658 | 0.93 | 7.43 | 0.45 | 55.09 |
| CUGGAAGG | | AGAACTAC | | | | | |
| GGCUCAGGCUCU | 423 | CACCCGGCAGAG | 659 | 0.93 | 7.38 | 0.34 | 65.82 |
| GCCGGGUG | | CCTGAGCC | | | | | |
| CCAUUCACCAAC | 424 | AGGGACGTGTTG | 660 | 0.61 | 39.26 | 0.13 | 86.83 |
| ACGUCCCU | | GTGAATGG | | | | | |
| ACCAGGUACAGG | 425 | GAGAACTACCTG | 661 | 0.84 | 16.09 | 0.23 | 76.96 |
| UAGUUCUC | | TACCTGGT | | | | | |
| CTGCAGUUUGCC | 426 | CGTGGATGGGCA | 662 | 1.11 | -10.69 | 0.40 | 60.08 |
| CAUCCACG | | AACTGCAG | | | | | |
| UUGUUCAUGAUC | 427 | GCCATGAAGATC | 663 | 0.86 | 14.13 | 0.55 | 45.23 |
| UUCAUGGC | | ATGAACAA | | | | | |
| UUGAUGUCCCUG | 428 | ACGTGCACAGGG | 664 | 0.93 | 6.92 | 0.57 | 43.07 |
| UGCACGU | | ACATCAAA | | | | | |
| GCGGUCCAGCAG | 429 | ACAACATCCTGCT | 665 | 0.61 | 38.84 | 0.16 | 83.64 |
| GAUGUUGU | | GGACCGC | | | | | |
| GUCUAUGGCCAU | 430 | AGATTGTCATGG | 666 | 1.11 | -11.00 | 0.27 | 73.11 |
| GACAAUCU | | CCATAGAC | | | | | |
| GGAGCAGGGAAA | 431 | GGAGGCGCTTTC | 667 | 0.79 | 21.46 | 0.12 | 88.35 |
| GCGCCUCC | | CCTGCTCC | | | | | |
| UGCCUCGCGUAG | 432 | CCAGTCAACTAC | 668 | 0.89 | 11.03 | 0.12 | 88.02 |
| UUGACUGG | | GCGAGGCA | | | | | |
| GCGGAUGGCCUC | 433 | GGGAGATGGAGG | 669 | 0.79 | 21.25 | 0.28 | 71.77 |
| CAUCUCCC | | CCATCCGC | | | | | |
| UUUCAUAGGCGA | 434 | GGGTGTATTCGCC | 670 | 0.94 | 5.56 | 0.47 | 53.28 |
| AUACACCC | | TATGAAA | | | | | |
| GCCUGUCAGCGA | 435 | CCTCCGACTCGCT | 671 | 0.89 | 10.81 | 0.24 | 75.67 |
| GUCGGAGG | | GACAGGC | | | | | |
| CCACUUCAGCUG | 436 | GGATGAAACAGC | 672 | 0.78 | 22.40 | 0.36 | 64.20 |
| UUUCAUCC | | TGAAGTGG | | | | | |
| CAUCCGCUCCUG | 437 | GGCAGTTGCAGG | 673 | 0.79 | 21.04 | 0.23 | 76.81 |
| CAACUGCC | | AGCGGATG | | | | | |
| UCUAGGGUUCAG | 438 | CGCGCTCCCTGA | 674 | 0.78 | 21.81 | 0.17 | 83.22 |
| GGAGCGCG | | ACCCTAGA | | | | | |
| CACCAACACGUC | 439 | AGGAGAGGGACG | 675 | 0.62 | 37.51 | 0.18 | 81.57 |
| CCUCUCCU | | TGTTGGTG | | | | | |
| CAGGAGCAGGGA | 440 | AGGCGCTTTCCCT | 676 | 0.88 | 12.48 | 0.48 | 51.82 |
| AAGCGCCU | | GCTCCTG | | | | | |
| CAAUCUCCGCCA | 441 | CTTCTACCTGGCG | 677 | 0.84 | 15.95 | 0.51 | 49.25 |
| GGUAGAAG | | GAGATTG | | | | | |
| AUGUUGUCGGGU | 442 | GACATCAAACCC | 678 | 0.83 | 16.93 | 0.47 | 52.83 |
| UUGAUGUC | | GACAACAT | | | | | |
| CCAUCCGCUCCU | 443 | GCAGTTGCAGGA | 679 | 0.80 | 19.53 | 0.28 | 71.62 |
| GCAACUGC | | GCGGATGG | | | | | |
| GCGUCACCUCGG | 444 | GGCTGAGGCCGA | 680 | 0.80 | 20.02 | 0.19 | 81.27 |
| CCUCAGCC | | GGTGACGC | | | | | |
| GAGGGCCUUUUA | 445 | CTCGCGAATAAA | 681 | 0.92 | 8.23 | 0.38 | 62.21 |
| UUCGCGAG | | AGGCCCTC | | | | | |
| AGCGGCAGAGAG | 446 | GAGCACCTCTCTC | 682 | 0.80 | 19.75 | 0.09 | 90.71 |
| AGGUGCUC | | TGCCGCT | | | | | |
| CAUCCAAAACGU | 447 | CCCAATCCACGTT | 683 | 0.81 | 19.12 | 0.22 | 77.98 |
| GGAUUGGG | | TTGGATG | | | | | |
| UUGGGCAGAUGG | 448 | AAGGCCCTCCAT | 684 | 0.81 | 19.08 | 0.22 | 78.39 |
| AGGGCCUU | | CTGCCCAA | | | | | |
| CCUCUGCCUCGC | 449 | TCAACTACGCGA | 685 | 0.93 | 7.39 | 0.15 | 85.33 |
| GUAGUUGA | | GGCAGAGG | | | | | |
| ACAGAACAACGG | 450 | CCTGTTCGCCGTT | 686 | 0.98 | 2.07 | 0.44 | 55.96 |
| CGAACAGG | | GTTCTGT | | | | | |
| CAGGAUGUUGUC | 451 | TCAAACCCGACA | 687 | 0.83 | 17.17 | 0.21 | 79.31 |
| GGGUUUGA | | ACATCCTG | | | | | |
| CGGCCUCAGCCU | 452 | TGCGGCAGAGGC | 688 | 0.93 | 6.71 | 0.40 | 60.06 |
| CUGCCGCA | | TGAGGCCG | | | | | |
| CAGCAGGAUGUU | 453 | AACCCGACAACA | 689 | 0.66 | 34.18 | 0.15 | 84.54 |
| GUCGGGUU | | TCCTGCTG | | | | | |
| GCAGAGAGAGGU | 454 | CAAGGAGCACCT | 690 | 0.83 | 17.29 | 0.14 | 85.95 |
| GCUCCUUG | | CTCTCTGC | | | | | |
| UCCAGUUCCAUG | 455 | CCCACACCCATG | 691 | 0.84 | 15.66 | 0.22 | 78.48 |
| GGUGUGGG | | GAACTGGA | | | | | |
| CCUCAGCCUGGC | 456 | TTCTTTCGGCCAG | 692 | 0.83 | 16.83 | 0.36 | 63.99 |
| CGAAAGAA | | GCTGAGG | | | | | |
| GGGCCUUUUAUU | 457 | CCCTCGCGAATA | 693 | 0.95 | 5.11 | 0.49 | 50.65 |
| CGCGAGGG | | AAAGGCCC | | | | | |
| GUCGGCCAGGCG | 458 | GCCACATCCGCCT | 694 | 0.85 | 15.35 | 0.25 | 74.59 |
| GAUGUGGC | | GGCCGAC | | | | | |
| GCUUGCUGCCUU | 459 | GGCCTGGGAAGG | 695 | 0.99 | 1.14 | 0.19 | 81.01 |
| CCCAGGCC | | CAGCAAGC | | | | | |
| GGUCCAGCAGGA | 460 | CGACAACATCCT | 696 | 0.68 | 31.78 | 0.20 | 79.93 |
| UGUUGUCG | | GCTGGACC | | | | | |
| CGGAGACCAUCC | 461 | CTCGACTGGGAT | 697 | 0.86 | 14.08 | 0.20 | 79.93 |
| CAGUCGAG | | GGTCTCCG | | | | | |
| UCUGCCUCGCGU | 462 | AGTCAACTACGC | 698 | 0.96 | 3.53 | 0.13 | 86.86 |
| AGUGACU | | GAGGCAGA | | | | | |
| AGGUAGUUCUCA | 463 | TTCCAGGATGAG | 699 | 0.93 | 7.36 | 0.37 | 62.62 |
| UCCUGGAA | | AACTACCT | | | | | |
| UCCUUGUAGUGG | 464 | AAGATCGTCCAC | 700 | 0.87 | 12.96 | 0.15 | 84.87 |
| ACGAUCUU | | TACAAGGA | | | | | |
| GCAUCCAAAACG | 465 | CCAATCCACGTTT | 701 | 0.97 | 2.54 | 0.27 | 72.69 |
| UGGAUUGG | | TGGATGC | | | | | |
| GUCCAGCAGGAU | 466 | CCGACAACATCC | 702 | 0.70 | 30.00 | 0.17 | 82.64 |
| GUGUCGG | | TGCTGGAC | | | | | |
| AGCUCCCGCAGC | 467 | GAGGTGACGCTG | 703 | 0.86 | 13.72 | 0.20 | 80.40 |
| GUCACCUC | | CGGGAGCT | | | | | |
| CGAGAGCAGCGC | 468 | CCTCACTTGCGCT | 704 | 1.02 | -2.19 | 0.63 | 37.11 |
| AAGUGAGG | | GCTCTCG | | | | | |
| CAGGGAAAGCGC | 469 | TATCGGAGGCGC | 705 | 0.89 | 11.10 | 0.08 | 91.59 |
| CUCCGAUA | | TTTCCCTG | | | | | |
| AUUUCAUAGGCG | 470 | GGTGTATTCGCCT | 706 | 1.05 | -4.54 | 0.56 | 44.15 |
| AAUACACC | | ATGAAAT | | | | | |
| UCGGCCAGGCGG | 471 | GGCCACATCCGC | 707 | 0.73 | 26.53 | 0.17 | 83.04 |
| AUGUGGCC | | CTGGCCGA | | | | | |
| AAGGGAUGUGUC | 472 | GACTTCCGGACA | 708 | 0.90 | 10.37 | 0.26 | 73.52 |
| CGGAAGUC | | CATCCCTT | | | | | |
| CUUGUAGUGGAC | 473 | GCAAGATCGTCC | 709 | 0.76 | 24.09 | 0.11 | 89.16 |
| GAUCUUGC | | ACTACAAG | | | | | |
| AGUCGGCCAGGC | 474 | CCACATCCGCCTG | 710 | 0.94 | 6.15 | 0.33 | 67.44 |
| GGAUGUGG | | GCCGACT | | | | | |
| GCCUCAGCCUGG | 475 | TCTTTCGGCCAGG | 711 | 1.05 | -4.82 | 0.37 | 63.11 |
| CCGAAAGA | | CTGAGGC | | | | | |
| AGCGUCACCUCG | 476 | GCTGAGGCCGAG | 712 | 0.78 | 22.10 | 0.35 | 64.70 |
| GCCUCAGC | | GTGACGCT | | | | | |
| CAGCGGCAGAGA | 477 | AGCACCTCTCTCT | 713 | 0.96 | 4.49 | 0.14 | 86.00 |
| GAGGUGCT | | GCCGCTG | | | | | |
| CCAGCGGCAGAG | 478 | GCACCTCTCTCTG | 714 | 0.97 | 3.23 | 0.15 | 84.55 |
| AGAGGUGC | | CCGCTGG | | | | | |
| UUGUAGUGGACG | 479 | GGCAAGATCGTC | 715 | 0.83 | 17.22 | 0.19 | 81.05 |
| AUCUUGCC | | CACTACAA | | | | | |
| AGGGAAAGCGCC | 480 | CTATCGGAGGCG | 716 | 1.01 | -1.12 | 0.25 | 75.50 |
| UCCGAUAG | | CTTTCCCT | | | | | |
| GGGAAAGCGCCU | 481 | CCTATCGGAGGC | 717 | 0.90 | 10.02 | 0.23 | 76.79 |
| CCGAUAGG | | GCTTTCCC | | | | | |

### Example 8: Selected Antisense Oligonucleotides Provided Dose-Dependent Reduction in DMPK Expression in Immortalized Myoblasts

[0807] Eighteen oligonucleotides from Example 7 were selected to be evaluated for their ability to reduce DMPK expression in a dose-responsive manner. DM1 C15 myoblasts were prepared as in Example 7 to yield differentiated myotubes in 96-well microplates. After seven days of differentiation, cells were transfected with individual oligonucleotides using Lipofectamine MessengerMax. Each oligonucleotide was tested in triplicate at concentrations of 0.046 nM, 0.137 nM, 0.412 nM, 1.235 nM, 3.704 nM, 11.11 nM, 33.33 nM, and 100 nM by 3-fold serial dilutions using 0.3 μL of Lipofectamine MessengerMax per well.

[0808] Following addition of oligonucleotide, cells were incubated for 72 hours prior to harvesting for total RNA. cDNA was synthesized from the total RNA extracts and qPCR was performed to determine expression levels of DMPK using a commercially available Taqman probeset in technical quadruplicate. All qPCR data were analyzed using a traditional ΔΔCT method and were normalized to a plate-based negative control that comprised of cells treated with vehicle control (0.3 μL/well Lipofectamine MessengerMax without any oligonucleotide). Data for each oligonucleotide to was fit to sigmoidal curve in order to determine an effective concentration of each oligonucleotide that provided a half-maximal response (EC-50). Results from these experiments are shown in Table 11.

[0809] Each of the eighteen antisense oligonucleotides selected for dose-dependent experimentation were capable of dose-dependently reducing DMPK in differentiated myotubes. Further, each of the tested antisense oligonucleotides reduced DMPK with EC-50 values below 25 nM. For example, antisense oligonucleotides comprising SEQ ID NOs: 362, 313, 320, 288, and 310 resulted in EC-50 values of 3.27 nM, 3.59 nM, 5.45 nM, 6.04 nM, and 24.59 nM, respectively. These data demonstrate that the antisense oligonucleotides shown in Table 11 are capable of dose-dependent reduction of DMPK in cellulo, suggesting that muscle-targeting complexes comprising these antisense oligonucleotides would be capable of targeting DMPK in muscle tissues in vivo.

TABLE 11
Ability ofDMPK-targeting antisense oligonucleotides to reduce expression of
DMPK in dose-dependent manner in cellulo

| | | | | Results | |
|---|---|---|---|---|---|
| | SEQ | | SEQ | | Percent DMPK |
| Antisense Oligonucleotide | NO: | DMPK Target | NO: | EC-50 | reduction at |
| Sequence | ID | Sequence | ID | (nM) | 100 nM |
| GCAGGAUGUUGUCGGGU | 299 | CAAACCCGACAA | 535 | 0.1679 | 89.77 |
| UUG | | CATCCTGC | | | |
| AGCAGGAUGUUGUCGGG | 316 | AAACCCGACAAC | 552 | 0.2266 | 85.81 |
| UUU | | ATCCTGCT | | | |
| GCGUAGAAGGGCGUCUG | 310 | GGGCAGACGCCC | 546 | 24.59 | 95.13 |
| CCC | | TTCTACGC | | | |
| CCCAGCGCCCACCAGUC | 320 | TGTGACTGGTGG | 556 | 5.454 | 63.69 |
| ACA | | GCGCTGGG | | | |
| CCAUCUCGGCCGGAAUC | 278 | GCGGATTCCGGC | 514 | 0.44 | 95.42 |
| CGC | | CGAGATGG | | | |
| CGUUCCAUCUGCCCGCA | 294 | AGCTGCGGGCAG | 530 | 0.19 | 89.97 |
| GCU | | ATGGAACG | | | |
| CAGGGACAGCCGCUGGA | 288 | AGTTCCAGCGGC | 524 | 6.04 | 90.59 |
| ACU | | TGTCCCTG | | | |
| CAUGGCAUACACCUGGC | 257 | CGGGCCAGGTGT | 493 | 0.42 | 75.28 |
| CCG | | ATGCCATG | | | |
| GCUUCAUCUUCACUACC | 286 | AGCGGTAGTGAA | 522 | 0.03 | 64.06 |
| GCU | | GATGAAGC | | | |
| GAAUGUCCGACAGUGUC | 293 | GGAGACACTGTC | 529 | 0.07 | 97.23 |
| UCC | | GGACATTC | | | |
| GGACGAUCUUGCCAUAG | 313 | GACCTATGGCAA | 549 | 3.59 | 92.18 |
| GUC | | GATCGTCC | | | |
| GCUGUCCCGGAGACCAU | 362 | GGGATGGTCTCC | 598 | 3.27 | 93.07 |
| CCC | | GGGACAGC | | | |
| GACAGAACAACGGCGAA | 346 | CTGTTCGCCGTTG | 582 | 0.08 | 94.32 |
| CAG | | TTCTGTC | | | |
| UGUUGUCGGGUUUGAUG | 301 | GGACATCAAACC | 537 | 0.21 | 93.95 |
| UCC | | CGACAACA | | | |
| CGAAUGUCCGACAGUGU | 260 | GAGACACTGTCG | 496 | 0.18 | 95.93 |
| CUC | | GACATTCG | | | |
| GGGCCUGGGACCUCACU | 270 | GACAGTGAGGTC | 506 | 0.07 | 90.58 |
| GUC | | CCAGGCCC | | | |
| CUCUGCCGCAGGGACAG | 272 | CGGCTGTCCCTG | 508 | 0.42 | 93.66 |
| CCG | | CGGCAGAG | | | |
| UUGCCAUAGGUCUCCGC | 280 | ACGGCGGAGACC | 516 | 0.37 | 93.70 |
| CGU | | TATGGCAA | | | |

### Example 9: Targeting DMPK in Mouse Muscle Tissues with a Muscle-Targeting Complex

[0810] The muscle-targeting complex described in Example 2, DTX-C-008, was tested for time-dependent inhibition of DMPK in mouse tissues in vivo. C57BL/6 wild-type mice were intravenously injected with a single dose of a vehicle control (phosphate-buffered saline (PBS)), control DMPK-ASO antisense oligonucleotide (ASO) (10 mg/kg of RNA), DTX-C-007 control complex (10 mg/kg of RNA), or DTX-C-008 (10 mg/kg of RNA) on Day 0 and euthanized after a prescribed period of time, as described in Table 12. One group of mice in each experimental condition was subjected to a second dose (multi-dose groups) at four weeks (Day 28). Following euthanization, the mice were segmented into isolated tissue types and samples of tibialis anterior and gastrocnemius muscle tissues were subsequently assayed for expression levels of DMPK (FIGS. 13A-13B).

TABLE 12
Experimental conditions

| | | Weeks after | |
|---|---|---|---|
| | | injection | |
| | | before | Number of |
| Group | Dosage | euthanization | mice |
| 1 | Single dose of vehicle (PBS) | 2 | 5 |
| 2 | Single dose of vehicle (PBS) | 4 | 5 |
| 3 | Single dose of vehicle (PBS) | 8 | 3 |
| 4 | Multi-dose of vehicle (PBS) | 8 | 2 |
| 5 | Single dose of vehicle (PBS) | 12 | 5 |
| 6 | Single dose of control DMPK-ASO | 2 | 5 |
| 7 | Single dose of control DMPK-ASO | 4 | 5 |
| 8 | Single dose of control DMPK-ASO | 8 | 5 |
| 9 | Multi-dose of control DMPK-ASO | 8 | 5 |
| 10 | Single dose of control DMPK-ASO | 12 | 5 |
| 11 | Single dose of DTX-C-007 control | 2 | 5 |
| 12 | Single dose of DTX-C-007 control | 4 | 5 |
| 13 | Single dose of DTX-C-007 control | 8 | 5 |
| 14 | Multi-dose of DTX-C-007 control | 8 | 5 |
| 15 | Single dose of DTX-C-007 control | 12 | 5 |
| 16 | Single dose of DTX-C-008 | 2 | 5 |
| 17 | Single dose of DTX-C-008 | 4 | 5 |
| 18 | Single dose of DTX-C-008 | 8 | 5 |
| 19 | Multi-dose of DTX-C-008 | 8 | 5 |
| 20 | Single dose of DTX-C-008 | 12 | 5 |

[0811] Mice treated with the DTX-C-008 complex demonstrated about 50-60% reduction in DMPK expression in tibialis anterior muscle (FIG. 13A) and about 30-50% reduction in DMPK expression in gastrocnemius muscle (FIG. 13B) for all of Groups 16-20 (2-12 weeks between injection and euthanization), relative to vehicle. These data show that a single dose of the muscle-targeting complex DTX-C-008 inhibits expression of DMPK for at least twelve weeks following administration of the complex.

[0812] In contrast, mice treated with the naked antisense oligonucleotide or the control complex did not demonstrate significant inhibition of DMPK expression across all experimental groups and tissues.

[0813] These data demonstrate that a muscle-targeting complex as described herein is capable of providing persistent inhibition of DMPK expression in vivo for up to 12 weeks following a single dose or administration of said muscle targeting complex.

### Example 10: A Muscle-Targeting Complex can Target Gene Expression in the Nucleus

[0814] A muscle-targeting complex as described in Example 2, DTX-C-008, was tested for inhibition of nuclear-retained DMPK RNA in mouse muscle tissues. The mice used for this Example have been engineered to express a human mutant DMPK gene—DMPK^{CUG380}hets having a G-for-C single-nucleotide polymorphism. As shown in FIG. 14A, the human mutant DMPK RNA is retained in the nucleus, while the mouse wild-type DMPK RNA is located in the cytoplasm and the nucleus.

[0815] Mice were intravenously injected with a single dose of a vehicle control (saline), a control complex DTX-C-007 (10 mg/kg of ASO), control DMPK-ASO (10 mg/kg of RNA), DTX-C-008 (10 mg/kg of ASO) and euthanized after 14 days. Six mice were treated in each experimental condition. Following euthanization, the mice were segmented into isolated tissue types and tissue samples were subsequently assayed for expression levels of mutant and wild-type DMPK (FIG. 14B).

[0816] Mice treated with the muscle-targeting complex DTX-C-008 demonstrated statistically significant reduction in both nuclear-retained mutant DMPK and wild-type DMPK. (p-value <0.05). These data demonstrate that a muscle-targeting complex as described herein is capable of targeting DMPK in the nucleus.

### Example 11: A Muscle-Targeting Complex Reverses Myotonia in HSA^{LR} Mouse Model

[0817] A muscle-targeting complex (DTX-Actin) was generated comprising an antisense oligonucleotide that targets actin (Actin-gapmer-1) covalently linked to DTX-A-002 (RI7 217 (Fab)), an anti-transferrin receptor antibody.

[0818] Actin-gapmer-1 is a 2′-MOE 5-10-5 gapmer that comprises: 5′-NH₂—(CH₂)₆-dA*oC*oC*oA*oT*oT*dT*dTMCMT*dTMCMCMAMCMA*oG*oG*oG*oC*oT-3 (SEQ ID NO: 761); wherein ‘*’ represents a PS linkage; ‘d’ represents a deoxynucleic acid; and ‘o’ represents a 2′-MOE.

[0819] DTX-Actin was then tested for its ability to reduce target gene expression (hACTA1) and reduce myotonia in HSA^{LR} mice, a mouse model that has a functional myotonia phenotype similar to that observed in human DM1 patients. Details of the HSA^{LR} mouse model are as described in Mankodi, A. et al. Science. 289: 1769, 2000. HSA^{LR} mice were intravenously injected with a single dose of PBS or DTX-Actin (either 10 mg/kg or 20 mg/kg ASO). Each of these three experimental conditions were replicated in two individual mice. On Day 14 after injection, mice were euthanized and specific muscles were collected—quadriceps (quad), gastrocnemius (gastroc) and tibialis anterior (TA). The muscle tissues were analyzed for expression of hACTA1. DTX-Actin demonstrated reduction of hACTA1 expression in all three muscle tissues relative to vehicle control (FIG. 15A).

[0820] On Day 14 after injection, and prior to the euthanasia and tissue collection described above, electromyography (EMG) was performed on specific muscles. EMG myotonic discharges were graded by a blinded examiner on a 4-point scale: 0, no myotonia; 1, occasional myotonic discharge in less than 50% of needle insertions; 2, myotonic discharge in greater than 50% of needle insertions; and 3: myotonic discharge with nearly every insertion. DTX-Actin demonstrated reduction in graded myotonia in all three muscle tissues relative to vehicle control (FIG. 15B). Mice treated with 20 mg/kg DTX-Actin demonstrated little-to-no myotonia in quadriceps and gastrocnemius muscles.

[0821] These data demonstrate that a single dose of a muscle-targeting complex is capable of gene-specific targeting and reduction in functional myotonia in in the HSA^{LR} mice, a mouse model that has a functional myotonia phenotype similar to that observed in human DM1 patients.

### Example 12: A Muscle-Targeting Complex can Functionally Correct Arrhythmia in a DM1 Mouse Model

[0822] A muscle-targeting complex as described in Example 2, DTX-C-008, was tested for its ability to functionally correct arrhythmia in a DM1 mouse model. The mice used for this Example are the offspring of mice expressing myosin heavy chain reverse tet transactivator (MHCrtTA) and mice expressing a mutant form of human DMPK (CUG₉₆₀). FIG. 16A shows the structure of the mutant DMPK construct.

[0823] Doxycycline containing chow (2 g doxycycline/kg chow, Bio-Serv) was provided to the mice beginning at postnatal day 1, initially through the nursing dam and subsequently through chow after weaning, to induce selective expression of mutant DMPK in the heart. All mice were maintained on chow containing doxycycline throughout the entire course of the study except the “off Dox Control” group. At 12 weeks of age, all mice underwent a baseline pre-dose ECG evaluation. Mice were then treated intravenously with a single dose of either vehicle (saline), control DMPK-ASO (10 mg/kg), DTX-C-008 (10 mg/kg) or DTX-C-008 (20 mg/kg). Following baseline pre-dose ECG evaluation mice in the “off Dox Control” group were switched to chow without doxycycline. Post dose ECG evaluations were performed in all mice 7 and 14 days after treatment, or in the case of the “off Dox Control” group 7 and 14 days after reversion to chow without doxycycline. For each ECG spectra, QRS (FIG. 16B) and QTc (FIG. 16C) intervals were measured.

[0824] In this model, mice treated with doxycycline exhibit prolongation of QRS and QTC intervals driven by expression of mutant DMPK in the heart, similar to those reported in DM1 patients, and consistent with increased propensity for cardiac arrhythmia. Removal of doxycycline for the diet in the “Off Dox Control” group turns off expression of mutant DMPK, resulting in a normalization of QRS and QTC intervals. Mice maintained on doxycycline and treated with 20 mg/kg of the muscle-targeting complex DTX-C-008 demonstrated statistically significant reduction in their QTc intervals after 14 days despite continued expression of mutant DMPK in the heart (FIG. 16C). This reduction in QTc intervals represents a correction in cardiac arrhythmia in a DM1 mouse model. These data demonstrate that a muscle-targeting complex as described herein is capable of providing a phenotypic and therapeutic benefit in a DM1 model.

### Example 13: A Muscle-Targeting Complex can Target DMPK and Correct DM1-Related Genetic Splicing

[0825] In isolated muscles cells derived from human DM1 patients, a muscle-targeting complex as described in Example 5, DTX-C-012, which comprises a 15G11 antibody, was tested for reduction of DMPK expression and subsequent correction of splicing defects in Bin1, a downstream gene of DMPK.

[0826] Briefly, patient cells were seeded at a density of 10 k cells/well before being allowed to recover overnight. Cells were then treated with PBS (vehicle control), control DMPK-ASO, or DTX-C-012 (500 nM; equivalent to 55.5 nM ASO). Cells were allowed to differentiate for 14 days. Expression levels of DMPK and % Bin1 exon-11 inclusion were determined on Days 10, 11, 12, 13, and 14 post differentiation.

[0827] Treatment of DM1 patient cells with the DTX-C-012 complex leads to reduction of DMPK levels as early as Day 10 post differentiation (FIG. 17A). Treatment of DM1 patient cells with the DTX-C-012 complex also leads to a statistically significant time-dependent change in Bin1 splicing (FIG. 17B). (**p<0.01, ***p<0.001). These data demonstrate that a muscle-targeting complex comprising a 15G11 antibody as described herein is capable of providing phenotypic and therapeutic benefit (increased correction of DM1 gene-specific splicing) in a DM1 model.

### Example 14: Selected Antisense Oligonucleotides Provided Dose-Dependent Reduction in DMPK Expression in DM1 and NHP Myotubes

[0828] The antisense oligonucleotides listed in Table 11 were further assessed to identify oligos that are safe in vivo (e.g., as indicated by low immunogenicity as measured by cytokine induction), and further based on manufacturability and secondary structure considerations. Three antisense oligonucleotides from Table 11, GCGUAGAAGGGCGUCUGCCC (SEQ ID NO: 310, DMPK-ASO-1), CCCAGCGCCCACCAGUCACA (SEQ ID NO: 320, DMPK-ASO-2), and CCAUCUCGGCCGGAAUCCGC (SEQ ID NO: 278, DMPK-ASO-3) were selected. These oligonucleotides were then further evaluated for their ability to reduce DMPK expression in DM1 myotubes and NHP myotubes in a dose-responsive manner. The tool compound (control DMPK-ASO) was used as control. Each of the antisense oligonucleotides were capable of dose-dependently reducing DMPK in DM1 and NHP myotubes (see FIGS. 18A-18C and FIGS. 19A-19B, respectively).

[0829] These data demonstrate that these antisense oligonucleotides are safe in vivo and are capable of dose-dependent reduction of DMPK in cellulo, suggesting that muscle-targeting complexes comprising these antisense oligonucleotides would be capable of targeting DMPK in muscle tissues in vivo.

### Example 15: Binding Affinity of Selected Anti-TfR1 Antibodies in Table 2 to Human TfR1

[0830] Selected anti-TfR1 antibodies were tested for their binding affinity to human TfR1 for measurement of Ka (association rate constant), Kd (dissociation rate constant), and K_{D} (affinity). Two known anti-TfR1 antibodies were used as control, 15G11 and OKT9. The binding experiment was performed on Carterra LSA at 25 C. An anti-mouse IgG and anti-human IgG antibody “lawn” was prepared on a HC30M chip by amine coupling. 59 IgGs (58 mouse mAbs and 1 human mAb) were captured on the chip. Dilution series of hTfR1, cyTfR1, and hTfR2 were injected to the chip for binding (starting from 1000 nM, 1:3 dilution, 8 concentrations).

[0831] Binding data were referenced by subtracting the responses from a buffer analyte injection and globally fitting to a 1:1 Langmuir binding model for estimate of Ka (association rate constant), Kd (dissociation rate constant), and K_{D} (affinity) using the Carterra™ Kinetics software. 5-6 concentrations were used for curve fitting.

[0832] The result showed the mouse mAbs demonstrated binding to hTfR1 with K_{D} values ranging from 13 pM to 50 nM. A majority of the mouse mAbs had K_{D} values in the single digit nanomolar to sub-nanomolar range. The tested mouse mAbs showed cross-reactive binding to cyTfR1 with K_{D} values ranging from 16 pM to 22 nM.

[0833] Ka, Kd, and K_{D} values of anti-TfR1 antibodies are provided in Table 13.

TABLE 13
Ka, Kd, and K_{D} values of anti-TfR1 antibodies

| Name | K_{D} (M) | Ka (M) | Kd (M) |
|---|---|---|---|
| ctrl-15G11 | 2.83E−10 | 3.70E+05 | 1.04E−04 |
| ctrl-OKT9 mIgG | 5.36E−10 | 7.74E+05 | 4.15E−04 |
| 3-A04 | 4.36E−10 | 4.47E+05 | 1.95E−04 |
| 3-M12 | 7.68E−10 | 1.66E+05 | 1.27E−04 |
| 5-H12 | 2.08E−07 | 6.67E+04 | 1.39E−02 |
| 10-H02 | 2.72E−09 | 1.26E+05 | 3.42E−04 |
| 10-P05 | 1.63E−09 | 1.70E+05 | 2.78E−04 |
| 2-H19 | 2.06E−09 | 2.22E+05 | 4.56E−04 |
| 3-E05 | 4.55E−10 | 2.20E+04 | 1.00E−05 |
| 3-F03 | 2.23E−09 | 1.38E+05 | 3.09E−04 |
| 3-M09 | 2.54E−09 | 1.50E+05 | 3.82E−04 |
| 3-P24 | 9.70E−10 | 6.72E+04 | 6.52E−05 |
| 4-C05 | 1.61E−09 | 3.01E+04 | 4.85E−05 |
| 4-H04 | 1.39E−08 | 6.17E+04 | 8.57E−04 |
| 4-O12 | 1.80E−09 | 7.98E+04 | 1.43E−04 |
| 6-D03 | 9.86E−10 | 1.08E+05 | 1.07E−04 |
| 8-D15 | 8.22E−09 | 3.13E+04 | 2.57E−04 |
| 8-K06 | 6.94E−11 | 1.44E+05 | 1.00E−05 |
| 8-O17 | 1.83E−09 | 4.99E+04 | 9.12E−05 |
| 9-C04 | 1.41E−08 | 4.10E+04 | 5.75E−04 |
| 9-D04 | 5.86E−09 | 4.20E+04 | 2.46E−04 |
| 9-K23 | 4.01E−10 | 5.40E+04 | 2.17E−05 |

### Example 16: Conjugation of Anti-TfR1 Antibodies with Oligonucleotides

[0834] Complexes containing an anti-TfR1 antibody listed in Table 2 covalently conjugated to a tool oligo (control DMPK-ASO) were generated. First, Fab′ fragments of anti-TfR antibody clones 3-A4, 3-M12, 5-H12, 8-K6, 9-K23, 3-E5, 6-D3, 4-O12, 4-O5, 10-P5, 2-H19, 3-F3, 8-O17, 3-M9, 10-H2, 4-J22, 9-D4, 8-D15, 4-H4, and 9-C4 were prepared by cutting the mouse monoclonal antibodies with an enzyme in or below the hinge region of the full IgG followed by partial reduction. The Fab's were confirmed to be comparable to mAbs in avidity or affinity.

[0835] Muscle-targeting complexes was generated by covalently linking the anti-TfR mAbs to the control DMPK-ASO via a cathepsin cleavable linker. Briefly, a Bicyclo[6.1.0]nonyne-PEG3-L-valine-L-citrulline-pentafluorophenyl ester (BCN-PEG3-Val-Cit-PFP) linker molecule was coupled to control DMPK-ASO through a carbamate bond. Excess linker and organic solvents were removed by tangential flow filtration (TFF). The purified Val-Cit-linker-ASO was then coupled to an azide functionalized anti-transferrin receptor antibody generated through modifying ε-amine on lysine with Azide-PEG4-PFP. A positive control muscle-targeting complex was also generated using 15G11.

[0836] The product of the antibody coupling reaction was then subjected to two purification methods to remove free antibody and free payload: 1) hydrophobic interaction chromatography (HIC-HPLC), and 2) Size exclusion chromatography (SEC). The HIC column utilized a decreasing salt gradient to separate free antibody from conjugate. During SEC, fractionation was performed based on A260/A280 traces to specifically collect conjugated material. Concentrations of the conjugates were determined by either Nanodrop A280 or BCA protein assay (for antibody) and Quant-It Ribogreen assay (for payload). Corresponding drug-antibody ratios (DARs) were calculated. DARs ranged between 0.8 and 2.0, and were standardized so that all samples receive equal amounts of payload.

[0837] The purified complexes were then tested for cellular internalization and inhibition of the target gene, DMPK. Non-human primate (NHP) or DM1 (donated by DM1 patients) cells were grown in 96-well plates and differentiated into myotubes for 7 days. Cells were then treated with escalating concentrations (0.5 nM, 5 nM, 50 nM) of each complex for 72 hours. Cells were harvested, RNA was isolated, and reverse transcription was performed to generate cDNA. qPCR was performed using TaqMan kits specific for Ppib (control) and DMPK on the QuantStudio 7. The relative amounts of remaining DMPK transcript in treated vs non-treated cells was were calculated and the results are shown in Table 14 and FIG. 20.

[0838] The results demonstrated that the anti-TfR1 antibodies are able to target muscle cells, be internalized by the muscle cells with the molecular payload (the tool oligo control DMPK-ASO), and that the molecular payload (DMPK ASO) are able to target and knockdown the target gene (DMPK).

TABLE 14
Binding Affinity of anti-TfR1 Antibodies and Efficacy of Conjugates

| | | | | % knockdown |
|---|---|---|---|---|
| | | | % knockdown of | of DMPK in cells |
| | | | DMPK in NHP | from human DM1 |
| | huTfR1 Avg | cyTfR1 Avg | cells using | patients using |
| | K_{D} (M) | K_{D} (M) | Antibody-DMPK | Antibody-DMPK |
| Clone Name | (antibody alone) | (antibody alone) | ASO conjugate | ASO conjugate |
| 15G11 (control) | 8.0E−10 | 1.0E−09 | 36 | 46 |
| 3-A4 | 4.36E−10 | 2.32E−09 | 77 | 70 |
| 3-M12 | 7.68E−10 | 5.18E−09 | 77 | 52 |
| 5-H12 | 2.02316E−07 | 1.20E−08 | 88 | 57 |
| 8-K6 | 6.78121E−11 | 3.76E−10 | 73 | 34 |
| 9-K23 | 3.19783E−10 | 6.62E−10 | 47 | −4 |
| 3-E5 | 4.55E−10 | 6.71E−10 | 59 | 71 |
| 6-D3 | 9.86E−10 | 7.78E−10 | −8 | −5 |
| 4-O12 | 1.27416E−09 | 2.70E−07 | −16 | 10 |
| 4-C5 | 1.38324E−09 | 1.36E−08 | −20 | 35 |
| 10-P5 | 1.63E−09 | 1.10E−08 | 58 | 55 |
| 2-H19 | 2.06E−09 | 5.75E−09 | 39 | 24 |
| 3-F3 | 2.23E−09 | 1.84E−08 | −15 | 20 |
| 8-O17 | 2.24245E−09 | 1.10E−09 | 26 | 41 |
| 3-M9 | 2.50135E−09 | 4.37E−09 | 52 | 39 |
| 10-H2 | 2.72E−09 | 1.24E−08 | 2 | 16 |
| 4-J22 | 3.41E−09 | 1.37E−09 | 7 | 57 |
| 9-D4 | 5.79556E−09 | 8.68E−10 | 42 | 62 |
| 8-D15 | 9.15057E−09 | 1.11E−08 | * | * |
| 4-H4 | 1.39E−08 | 2.18E−08 | * | * |
| 9-C4 | 1.47657E−08 | 1.20E−08 | * | * |

* very low yield from expression/conjugation

[0839] Interestingly, the DMPK knockdown results showed a lack of correlation between the binding affinity of the anti-TfR to transferrin receptor and efficacy in delivering a DMPK ASO to cells for DMPK knockdown. Surprisingly, the anti-TfR antibodies provided herein (e.g., at least 3-A4, 3-M12, 5-H12, 8-K6, 3-E5, 10-P5, 3-M9, and 9-D4) demonstrated superior activity in delivering a payload (e.g., DMPK ASO) to the target cells and achieving the biological effect of the molecular payload (e.g., DMPK knockdown) in either cyno cells or human DM1 patient cells, compared to the control antibody 15G11, despite the comparable binding affinity (or, in certain instances, such as 5-H12, lower binding affinity) to human or cyno transferrin receptor between these antibodies and the control antibody 15G11.

[0840] Top attributes such as high huTfR1 affinity, >50% knockdown of DMPK in NHP and DM1 patient cell line, identified epitope binding with 3 unique sequences, low/no predicted PTM sites, and good expression and conjugation efficiency were considered for the selection of clones for humanization.

### Example 16. Binding Activities of the Anti-TfR1 Antibodies

[0841] The screen identified 1 scFv clone (shown in Table 7), which was reformatted into different formats. The binding activity of selected formats were tested against human TfR1, cyno TfR1, and human TfR2 in an ELISA assay. 15G11 was used as control in this experiment. The results show that all tested antibodies bind to human TfR1 and cyno TfR1 (FIGS. 21A and 21B), but do not bind to human TfR2 (FIG. 22). The EC50 values for each tested antibody are provided in Table 15.

TABLE 12
EC50 (nM) values for anti-TfR antibodies

| | | | hIgG1 (with | | |
|---|---|---|---|---|---|
| | | | L234A/L235A | | |
| | | | mutations in HC | | |
| | 15G11 | ScFv | constant region) | FAB | scFv_C_Fc |
| Cyno TfR1 | 1.08 | 14.75 | 22.01 | 63.89 | 27.21 |
| Human TfR1 | 0.589 | 24.8 | 75.83 | 101.9 | 49.56 |

### Example 17: Conjugation of Anti-TfR1 Antibodies with Oligonucleotides

[0842] Complexes containing an anti-TfR1 Fab (Table 7) covalently conjugated to a tool oligo, control DMPK-ASO (targeting DMPK), were generated. The TfR Fab tested comprises a VH of SEQ ID NO: 204 and a VL of SEQ ID NO: 205. A Fab′ fragment of a known anti-TfR antibody, 15G11 was generated and used to produce a complex as positive control.

[0843] Muscle-targeting complexes was generated by covalently linking the anti-TfR antibodies to control DMPK-ASO via a cathepsin cleavable linker. The purified Val-Cit-linker-ASO was coupled to functionalized anti-transferrin receptor antibodies generated through modifying ε-amine on lysine of the antibody.

[0844] The product of the antibody coupling reaction was then subjected to two purification methods to remove free antibody and free payload: 1) hydrophobic interaction chromatography (HIC-HPLC), and 2) Size exclusion chromatography (SEC). The HIC column utilized a decreasing salt gradient to separate free antibody from conjugate. During SEC, fractionation was performed based on A260/A280 traces to specifically collect conjugated material. Concentrations of the conjugates were determined by either Nanodrop A280 or BCA protein assay (for antibody) and Quant-It Ribogreen assay (for payload). Corresponding drug-antibody ratios (DARs) were calculated. DAR was about 2.05.

[0845] The purified complexes were then tested for cellular internalization and inhibition of DMPK. Non-human primate (NHP) or DM1 (donated by DM1 patients) cells were grown in 96-well plates and differentiated into myotubes for 7 days. Cells were then treated with escalating concentrations (0.5 nM, 5 nM, 50 nM) of each complex for 72 hours. Cells were harvested, RNA was isolated, and reverse transcription was performed to generate cDNA. qPCR was performed using TaqMan kits specific for Ppib (control) and DMPK on the QuantStudio 7. The relative amounts of remaining DMPK transcript in treated vs non-treated cells was were calculated and the results are shown in FIG. 23. The complex containing anti-TfR Fab described herein achieved comparable DMPK knockdown as the complex containing 15G11.

[0846] The results demonstrated that the anti-TfR1 antibodies are able to target muscle cells, be internalized by the muscle cells with the molecular payload (the tool oligo control DMPK-ASO), and that the molecular payload (DMPK ASO) are able to target and knockdown the target gene (DMPK).

### Example 18. Binding and Biological Activity of Anti-TfR-Oligonucleotide Conjugates

[0847] The anti-TfR antibody described herein (e.g., as in Table 7) alone or in a conjugate where the antibody was conjugated to a DMPK-targeting oligonucleotide (control DMPK-ASO) were tested for binding to human (FIG. 24A) and cynomolgus monkey (FIG. 24B) TfR1. Results demonstrate that binding of the anti-TfR antibody to both hTfR1 and cynoTfR1 increases 3-6-fold upon conjugation to DMPK-targeting oligonucleotide.

[0848] The conjugate was also tested in cellular uptake experiments to evaluate TfR1-mediated internalization. To measure such cellular uptake mediated by antibodies, the anti-TfR antibody was conjugated to several different DMPK-targeting oligonucleotides, and the conjugate were labeled with Cypher5e, a pH-sensitive dye. Rhabdomyosarcoma (RD) cells were treated for 4 hours with 100 nM of the conjugates, trypsinized, washed twice, and analyzed by flow cytometry. Mean Cypher5e fluorescence (representing uptake) was calculated using Attune NxT software. As shown in FIG. 25, the anti-TfR antibody show endosomal uptake. Similar internalization efficiency were observed for different oligonucleotide payloads. An anti-mouse TfR antibody was used as the negative control. Cold (non-internalizing) conditions abrogated the fluorescence signal of the positive control antibody-conjugate (data not shown), indicating that the positive signal in the positive control and humanized anti-TfR Fab-conjugates is due to internalization of the Fab-conjugates.

[0849] The activity of the conjugate containing the anti-TfR antibody and the DMPK-targeting oligonucleotide (control DMPK-ASO) in knocking down DMPK mRNA level in RD cells was also tested. The results showed that the conjugated achieved dose-dependent knock down of DMPK mRNA level (FIG. 26).

[0850] The results demonstrate that the anti-TfR1 antibody bind to TfR1 on muscles with high affinity, can mediate the internalized of a conjugated molecular payload (e.g., oligonucleotide) and that the molecular payload (DMPK-targeting oligonucleotide) are able to target and knockdown the target gene (DMPK). Molecular payloads targeting other genes can also be conjugated to the anti-TfR antibody described herein and used to target other genes specifically in muscle cells.

### Example 19. Serum Stability of the Linker Linking the Anti-TfR Antibody and the Molecular Payload

[0851] Oligonucleotides which were linked to antibodies in examples were conjugated via a cleavable linker shown in Formula (C). It is important that the linker maintain stability in serum and provide release kinetics that favor sufficient payload accumulation in the targeted muscle cell. This serum stability is important for systemic intravenous administration, stability of the conjugated oligonucleotide in the bloodstream, delivery to muscle tissue and internalization of the therapeutic payload in the muscle cells. The linker has been confirmed to facilitate precise conjugation of multiple types of payloads (including ASOs, siRNAs and PMOs) to Fabs. This flexibility enabled rational selection of the appropriate type of payload to address the genetic basis of each muscle disease. Additionally, the linker and conjugation chemistry allowed the optimization of the ratio of payload molecules attached to each Fab for each type of payload, and enabled rapid design, production and screening of molecules to enable use in various muscle disease applications.

[0852] FIG. 27 shows serum stability of the linker in vivo, which was comparable across multiple species over the course of 72 hours after intravenous dosing. At least 75% stability was measured in each case at 72 hours after dosing.

### Example 20. Knockdown of DMPK mRNA Level Facilitated by Oligonucleotides Conjugates In Vitro

[0853] DMPK-targeting oligonucleotides (e.g., ASO) were tested in rhabdomyosarcoma (RD) cells for knockdown of DMPK transcript expression. RD cells were cultured in a growth medium of DMEM with glutamine, supplemented with 10% FBS and penicillin/streptomycin until nearly confluent. Cells were then seeded into a 96 well plate at 20K cells per well and were allowed to recover for 24 hours. Cells were then treated with free DMPK-targeting oligonucleotides or by transfection of the oligonucleotides using 0.3 μL per well of Lipofectamine MessengerMAX transfection reagent. After 3 days, total RNA was collected from cells, cDNA was synthesized and DPMK expression was measured by qPCR.

[0854] Results in FIG. 28 show that DMPK expression level was reduced in cells treated with each given DMPK-targeting oligonucleotide, relative to expression in PBS-treated cells. Several DMPK-oligonucleotides showed dose-dependent reduction of DMPK expression level. In FIG. 28, DMPK-ASO-1 has the sequence GCGUAGAAGGGCGUCUGCCC (SEQ ID NO: 310). DMPK-ASO-2 has the sequence CCCAGCGCCCACCAGUCACA (SEQ ID NO: 320). DMPK-ASO-3 has the sequence CCAUCUCGGCCGGAAUCCGC (SEQ ID NO: 278). Control DMPK-ASO was also used in this experiment.

### Example 21. Splicing Correction and Functional Efficacy in HSA-LR Mouse Model of DM1

[0855] Correction of splicing in the HSA-LR mouse model of DM1 was demonstrated with conjugates containing anti-TfR antibodies conjugated to oligonucleotides target human skeletal actin (ACTA1). The anti-TfR1 used in this study was RI7 217. The oligonucleotide targeting ACTA1 is a 2′-MOE 5-10-5 gapmer that comprises: 5′-NH₂—(CH₂)₆-dA*oC*oC*oA*oT*oT*dT*dTMCMT*dTMCMCMAMCMA*oG*oG*oG*oC*oT-3 (SEQ ID NO: 761); wherein ‘*’ represents a PS linkage; ‘d’ represents a deoxynucleic acid; and ‘o’ represents a 2′-MOE.

[0856] The HSA-LR DM1 mouse model is a well-validated model of DM1 that exhibits pathologies that are very similar to human DM1 patients. The HSA-LR model uses the human skeletal actin (ACTA1) promoter to drive expression of CUG long repeats (LR). In this model, toxic DMPK RNA accumulates within the nucleus and sequesters proteins responsible for splicing, such as Muscleblind-like protein (MBNL), resulting in mis-splicing of multiple RNAs, including CLCN1 (chloride channel), ATP2a1 (calcium channel), and others. This mis-splicing causes the mice to also exhibit myotonia which is a hallmark of the DM1 clinical presentation in humans.

[0857] The anti-TfR-oligonucleotide conjugate delivered intravenously has previously been shown to have activity in dose-dependent correction of splicing in multiple RNAs and multiple muscles and was well tolerated by HSA-LR mice. In this study, the ability of the conjugates to correct splicing in more than 30 different RNAs was evaluated. DM1, significant RNA mis-splicing of these RNAs reduces the ability of multiple muscles' function. The RNAs monitored are critical for contraction and relaxation of muscle in HSA-LR mice. Dose-dependent correction of splicing was observed.

[0858] FIG. 29 shows results for Atp2a1, which encodes a calcium channel and contributes to muscle contraction and relaxation. The X-axis represents splice derangement with 1.00 representing severe mis-splicing and 0.00 representing a wild type (WT) splice pattern. Progression from right to left in the figure represents a correction of splicing. The Y-axis represents the percent of the gene spliced in (PSI). Severe mis-splicing of ATP2a1 is caused by exclusion of exon 22 in the ATP2a1 RNA. WT splicing reflects near complete inclusion of exon 22. Results demonstrate that the conjugate corrected splicing of ATP2a1 in a dose-dependent manner in the gastrocnemius muscle.

[0859] Data for the more than 30 different RNAs that were tested in this study are shown in FIGS. 30A-30C. Similar dose-dependent correction of splicing was achieved for all of the tested RNAs in gastrocnemius muscle. For some of these RNAs, correction of splicing is reflected by a decrease in PSI, as in FIG. 29, and for other RNAs correction is reflected by an increase in PSI.

[0860] Similar dose-dependent improvements in splicing within the set of RNAs were observed in the quadriceps and tibialis anterior muscles, after treatment with the conjugate. FIG. 31 shows composite levels of splicing derangement observed for saline and different doses of the Ab-ASO across the more than 30 RNAs that were tested in each muscle type. Doses of 10 mg/kg and 20 mg/kg were administered in this study.

[0861] In addition to reductions in splicing derangement across multiple genes in several muscles in the HSA-LR model, disease modification was observed in the HSA-LR model. The results in FIG. 32 show that almost complete reversal of myotonia was achieved after a single dose of the conjugate. The severity of myotonia on a four-point scale was evaluated 14 days following dosing with saline (PBS), naked oligonucleotide, or the conjugate. Grade 0 indicates no myotonia was observed, grade 1 indicates myotonic discharge was measured by electromyography (EMG) in less than 50% of needle insertions, grade 2 indicates myotonic discharge was measured in greater than 50% of needle insertions and grade 3 indicates myotonic discharge was measured with nearly every needle insertion.

### Example 22. DMPK-Targeting PMOs

[0862] Additional DMPK targeting oligonucleotides (PMOs) were designed and tested for their activity in reducing DMPK expression in primary human myotubes. Wild-type primary myoblasts were cultured in PromoCell Skeletal Muscle growth medium with 5% FBS and penicillin/streptomycin until nearly confluent. Cells were then seeded into a 96 well plate at 50K cells per well and allowed to recover for 24 hours. Cells were then differentiated in a differentiation medium of DMEM with glutamine and penicillin/streptomycin for 7 days. Cells were then treated with the unconjugated PMO for 3 days. Total RNA was collected from cells, cDNA was synthesized and DPMK expression was measured by qPCR. The sequences of the PMOs and their activity in knocking down DMPK in vitro are shown in Table 16.

TABLE 16
DMPK-targeting PMOs and activity in knocking down DMPK in vitro

| | | | % DMPK Knockdown |
|---|---|---|---|
| | | | in Primary Human |
| PMO# | PMO Sequence | Target region | Myotubes |
| 1 | CAGGTGACAGTTCAGGTGCAG | intron 1-2 | 59% |
| | (SEQ ID NO: 778) | | |
| 2 | TCCACCCTGACTCCAGGTGAC | intron 1-2 | 16% |
| | (SEQ ID NO: 779) | | |
| 3 | GAGAAGGAAATAAGACCCAGTT | intron 1-2 | 14% |
| | (SEQ ID NO: 780) | | |
| 4 | CCTTCTCTCTGCCTCTCAGCTT | intron 1-2 | 58% |
| | (SEQ ID NO: 781) | | |
| 5 | CCACCCTCTGTCTGTCTCC | intron 1-2 | 64% |
| | (SEQ ID NO: 782) | | |
| 6 | TCCGCTGGGTGGTGGGAAAAGAA | Exon 2 | 9% |
| | (SEQ ID NO: 783) | | |
| 7 | ATGGGCTCCGCTGGGTGGTGG | Exon 2 | 11% |
| | (SEQ ID NO: 784) | | |
| 8 | ACGATGGGCTCCGCTGGG | Exon 2 | 60% |
| | (SEQ ID NO: 785) | | |
| 9 | CCATCCTTGGGCAGAGACCT | Intron 4-5 | 41% |
| | (SEQ ID NO: 786) | | |
| 10 | ATGACCAGGTACTGAGAAGGG | Exon 5 | 33% |
| | (SEQ ID NO: 787) | | |
| 11 | AGGTACTGAGAAGGGTTCGTC | Exon 5 | 40% |
| | (SEQ ID NO: 788) | | |
| 12 | TAGGGACCTGCGGAGAGGGCGA | Exon 15 | 35% |
| | (SEQ ID NO: 789) | | |
| 13 | GCCTAGGGACCTGCGGGAGAG | Exon 15 | 62% |
| | (SEQ ID NO: 790) | | |
| 14 | GCCTTTTATTCGCGAGGGTCGG | polyA | 73% |
| | (SEQ ID NO: 791) | | |
| 15 | TGGAGGGCCTTTTATTCGCGAGG | polyA | 66% |
| | (SEQ ID NO: 792) | | |
| 39 | TAGGCACTCACCCACTGCAAGA | Exon 1 | 69% |
| | (SEQ ID NO: 793) | | |
| 40 | CGGAGCTCACCAGGTAGTTCT | Intron 4-5 | 73% |
| | (SEQ ID NO: 794) | | |
| 41 | AGGGCAGTGCTTACCTGAGGG | Intron 9-10 | 57% |
| | (SEQ ID NO: 795) | | |

### Example 23. In Vivo Activity of Anti-TfR Conjugates in hTfR1 Mice

[0863] In DM1, the higher than normal number of CUG repeats form large hairpin loops that remain trapped in the nucleus, forming nuclear foci that bind splicing proteins and inhibit the ability of splicing proteins to perform their normal function. When toxic nuclear DMPK levels are reduced, the nuclear foci are diminished, releasing splicing proteins, allowing restoration of normal mRNA processing, and potentially stopping or reversing disease progression.

[0864] The in vivo activity of conjugates containing an anti-TfR Fab′ (a control anti-TfR Fab′ or an anti-TfR Fab′ comprising a HC of SEQ ID NO: 777 and a LC of SEQ ID NO: 212) conjugated to the DMPK-targeting oligonucleotide (control DMPK-ASO) in reducing DMPK mRNA level in multiple muscle tissues following systemic intravenous administration in mice was evaluated.

[0865] Male and female C57BL/6 mice where one TfR1 allele was replaced with a human TFR1 allele were administered between the ages of 5 and 15 weeks according to the dosing schedule outlined in Table 17. Mice were sacrificed 14 days after the first injection and selected muscles collected as indicated in Table 18.

TABLE 17

| | | | | Dose | Dose | | Terminal |
|---|---|---|---|---|---|---|---|
| | Animal | Treatment | Treatment | Level | Volume | Dosing | Time |
| Group | No. | Antibody | Oligo | (mg/kg) | (mL/kg) | Regimen | Point |
| 1 | 4 | Vehicle | NA | 0 | 10 | Day 0 | Day 14 |
| 2 | 4 | NA | control | 10 | 5.0 | and Day | |
| | | | DMPK- | | | 7 by IV | |
| | | | ASO | | | | |
| 3 | 4 | control anti- | control | | 10.2 | | |
| | | TfR Fab′ | DMPK- | | | | |
| | | | ASO | | | | |
| 4 | 4 | anti-TfR | control | | 9.1 | | |
| | | having HC of | DMPK- | | | | |
| | | SEQ ID NO: | ASO | | | | |
| | | 777 and LC | | | | | |
| | | of SEQ ID | | | | | |
| | | NO: 212 | | | | | |

TABLE 18

| Tissue | Storage |
|---|---|
| Gastrocnemius | Right leg of each animal stored |
| | in RNALater at −80° C. |
| Tibialis | One leg (R) of each animal stored |
| Anterior | in RNALater at −80° C. |
| Heart | Dissect transversally and store |
| | the apex in RNAlater at −80° C. |
| Diaphragm | Split in half and collect one |
| | half in RNAlater at −80° C. |

[0866] Total RNA was extracted on a Maxwell Rapid Sample Concentrator (RSC) Instrument using kits provided by the manufacturer (Promega). Purified RNA was reverse-transcribed and levels of Drnpk and Ppib transcripts determined by qRT-PCR with specific TaqMan assays (ThermoFlsher). Log fold changes in Drnpk expression were calculated according to the 2^{-ΔΔCT} method using Ppib as the reference gene and mice injected with vehicle as the control group. Statistical significance in differences of Dmpk expression between control mice and mice administered with the conjugates were determined by one-way ANOVA with Dunnet's correction for multiple comparisons. As shown in FIGS. 33A-33D, the tested conjugates showed robust activity in reducing DMPK mRNA level in vivo in various muscle tissues.

### Example 24. In Vitro Activity of Anti-TfR Conjugates in Patient-Derived Cells

[0867] An in vitro experiment was conducted to determine the activities of anti-TfR conjugates in reducing DMPK mRNA expression, correcting BIN1 splicing, and reducing nuclear foci in CM-DM1-32F primary cells expressing a mutant DMPK mRNA containing 380 GTG repeats. The CM-DM1-32F primary cell is an immortalized myoblastic cell line isolated from a DM1 patient (CL5 cells; Described in Arandel et al., Dis Model Mech. 2017 Apr. 1; 10(4): 487-497). Conjugate 1 contains an anti-TfR mAb conjugated to DMPK-targeting oligonucleotide, control DMPK-ASO. Conjugate 2 contains an anti-TfR Fab′ conjugated to DMPK ASO-1 (GCGUAGAAGGGCGUCUGCCC; SEQ ID NO: 310).

[0868] CL5 cells were seeded at a density of 156,000 cells/cm², allowed to recover for 24 hours, transferred to differentiation media to induce myotube formation, as described (Arandel et al.) and subsequently exposed to conjugate 1 and conjugate 2 at a payload concentration of 500 nM. Parallel cultures exposed to vehicle PBS served as controls. Cells were harvested after 10 days of culture.

[0869] For analysis of gene expression, cells were collected with Qiazol for total RNA extraction with a Qiagen miRNAeasy kit. Purified RNA was reverse-transcribed and levels of DMPK, PPIB, BIN1 transcripts and of the BIN1 mRNA isoform containing exon 11 determined by qRT-PCR with specific TaqMan assays (ThermoFlsher). Log fold changes in DMPK expression were calculated according to the 2^{-ΔΔCT} method using PPIB as the reference gene and cells exposed to vehicle as the control group. Log fold changes in the levels BIN1 isoform containing exon 11 were calculated according to the 2^{-ΔΔCT} method using BIN1 as the reference gene and cells exposed to vehicle as the control group.

[0870] To measure the area of mutant DMPK nuclear foci, cells were fixed in 4% formalin, permeabilized with 0.1% Triton X-100 and hybridized at 70° C. with a CAG peptide-nucleic acid probe conjugated to the Cy5 fluorophore. After multiple washes in hybridization buffer and 2×SSC solution, nuclei were counterstained with DAPI. Images were collected at a 400× magnification by confocal microscopy and foci area measured as the area of Cy5 signal contained within the area of DAPI signal. Data were expressed as foci area corrected for nuclear area.

[0871] The results show that a single dose of the conjugates containing an anti-TfR (IgG or Fab′) conjugated to a DMPK-targeting oligonucleotide (control DMPK-ASO or DMPK ASO-1 (SEQ ID NO: 310)) resulted reduced mutant DMPK expression (FIG. 34A), corrected BIN1 splicing (FIG. 34B), and reduced nuclear foci by approximately 40% (FIG. 34C).

### Additional Embodiments

[0872] 1. A complex comprising a muscle-targeting agent covalently linked to a molecular payload configured for inhibiting expression or activity of a DMPK allele comprising a disease-associated-repeat, wherein the muscle-targeting agent specifically binds to an internalizing cell surface receptor on muscle cells,

[0873] wherein the muscle targeting agent is an antibody that binds to a transferrin receptor and comprises a heavy chain variable region (VH) comprising a CDR-H1, a CDR-H2, and a CDR-H3 of any one of the antibodies listed in Table 2, Table 4, or Table 7, and/or a light chain variable region (VL) comprising a CDR-L1, a CDR-L2, and a CDR-L3 of any one of the antibodies listed in Table 2, Table 4, or Table 7.

[0874] 2. The complex of embodiment 1, wherein the antibody comprises a VH that is at least 85% identical to the VH of any one of the antibodies listed in Table 2 or Table 7, and/or a VL that is at least 85% identical to the VL of any one of the antibodies listed in Table 2 or Table 7.

[0875] 3. The complex of embodiment 1, wherein the antibody is selected from:

[0876] (i) an antibody comprising a CDR-H1, a CDR-H2, and a CDR-H3 of a VH comprising the amino acid sequence of SEQ ID NO: 7, and/or a CDR-L1, a CDR-L2, and a CDR-L3 of a VL comprising the amino acid sequence of SEQ ID NO: 8;

[0877] (ii) an antibody comprising a CDR-H1, a CDR-H2, and a CDR-H3 of a VH comprising the amino acid sequence of SEQ ID NO: 15, and/or a CDR-L1, a CDR-L2, and a CDR-L3 of a VL comprising the amino acid sequence of SEQ ID NO: 16;

[0878] (iii) an antibody comprising a CDR-H1, a CDR-H2, and a CDR-H3 of a VH comprising the amino acid sequence of SEQ ID NO: 23, and/or a CDR-L1, a CDR-L2, and a CDR-L3 of a VL comprising the amino acid sequence of SEQ ID NO: 24; and

[0879] (iv) an antibody comprising a CDR-H1, a CDR-H2, and a CDR-H3 of a VH comprising the amino acid sequence of SEQ ID NO: 204, and/or a CDR-L1, a CDR-L2, and a CDR-L3 of a VL comprising the amino acid sequence of SEQ ID NO: 205.

[0880] 4. The complex of embodiment 1, wherein the antibody comprises:

[0881] (i) a CDR-H1 of SEQ ID NO: 1, a CDR-H2 of SEQ ID NO: 2, SEQ ID NO: 731, or SEQ ID NO: 80, a CDR-H3 of SEQ ID NO: 3, a CDR-L1 of SEQ ID NO: 4, a CDR-L2 of SEQ ID NO: 5, and a CDR-L3 of SEQ ID NO: 6;

[0882] (ii) a CDR-H1 of SEQ ID NO: 145, a CDR-H2 of SEQ ID NO: 146, SEQ ID NO: 732, or SEQ ID NO: 734, a CDR-H3 of SEQ ID NO: 147, a CDR-L1 of SEQ ID NO: 148, a CDR-L2 of SEQ ID NO: 149, and a CDR-L3 of SEQ ID NO: 6; or

[0883] (iii) a CDR-H1 of SEQ ID NO: 150, a CDR-H2 of SEQ ID NO: 151, SEQ ID NO: 739, or SEQ ID NO: 740, a CDR-H3 of SEQ ID NO: 152, a CDR-L1 of SEQ ID NO: 153, a CDR-L2 of SEQ ID NO: 5, and a CDR-L3 of SEQ ID NO: 154.

[0884] 5. The complex of embodiment 1, wherein the antibody comprises:

[0885] (i) a CDR-H1 of SEQ ID NO: 9, a CDR-H2 of SEQ ID NO: 10, a CDR-H3 of SEQ ID NO: 11, a CDR-L1 of SEQ ID NO: 12, a CDR-L2 of SEQ ID NO: 13, and a CDR-L3 of SEQ ID NO: 14;

[0886] (ii) a CDR-H1 of SEQ ID NO: 155, a CDR-H2 of SEQ ID NO: 156, a CDR-H3 of SEQ ID NO: 157, a CDR-L1 of SEQ ID NO: 158, a CDR-L2 of SEQ ID NO: 159, and a CDR-L3 of SEQ ID NO: 14; or

[0887] (iii) a CDR-H1 of SEQ ID NO: 160, a CDR-H2 of SEQ ID NO: 161, a CDR-H3 of SEQ ID NO: 162, a CDR-L1 of SEQ ID NO: 163, a CDR-L2 of SEQ ID NO: 13, and a CDR-L3 of SEQ ID NO: 164.

[0888] 6. The complex of embodiment 1, wherein the antibody comprises:

[0889] (i) a CDR-H1 of SEQ ID NO: 17, SEQ ID NO: 735, or SEQ ID NO: 737, a CDR-H2 of SEQ ID NO: 18, a CDR-H3 of SEQ ID NO: 19, a CDR-L1 of SEQ ID NO: 20, a CDR-L2 of SEQ ID NO: 21, and a CDR-L3 of SEQ ID NO: 22;

[0890] (ii) a CDR-H1 of SEQ ID NO: 165, SEQ ID NO: 736, or SEQ ID NO: 738, a CDR-H2 of SEQ ID NO: 166, a CDR-H3 of SEQ ID NO: 167, a CDR-L1 of SEQ ID NO: 168, a CDR-L2 of SEQ ID NO: 169, and a CDR-L3 of SEQ ID NO: 22; or

[0891] (iii) a CDR-H1 of SEQ ID NO: 170, a CDR-H2 of SEQ ID NO: 171, a CDR-H3 of SEQ ID NO: 172, a CDR-L1 of SEQ ID NO: 173, a CDR-L2 of SEQ ID NO: 21, and a CDR-L3 of SEQ ID NO: 174.

[0892] 7. The complex of embodiment 8, wherein the antibody comprises:

[0893] (i) a CDR-H1 of SEQ ID NO: 188, a CDR-H2 of SEQ ID NO: 189, a CDR-H3 of SEQ ID NO: 190, a CDR-L1 of SEQ ID NO: 191, a CDR-L2 of SEQ ID NO: 192, and a CDR-L3 of SEQ ID NO: 193;

[0894] (ii) a CDR-H1 of SEQ ID NO: 194, a CDR-H2 of SEQ ID NO: 195, a CDR-H3 of SEQ ID NO: 196, a CDR-L1 of SEQ ID NO: 197, a CDR-L2 of SEQ ID NO: 198, and a CDR-L3 of SEQ ID NO: 193; or

[0895] (iii) a CDR-H1 of SEQ ID NO: 199, a CDR-H2 of SEQ ID NO: 200, a CDR-H3 of SEQ ID NO: 201, a CDR-L1 of SEQ ID NO: 202, a CDR-L2 of SEQ ID NO: 192, and a CDR-L3 of SEQ ID NO: 203.

[0896] 8. The complex of any one of embodiments 1-7, wherein the antibody is selected from:

[0897] (i) an antibody comprising a VH comprising an amino acid sequence at least 85% identical to SEQ ID NO: 7, and/or a VL comprising an amino acid sequence at least 85% identical to SEQ ID NO: 8;

[0898] (ii) an antibody comprising a VH comprising an amino acid sequence at least 85% identical to SEQ ID NO: 15, and/or a VL comprising an amino acid sequence at least 85% identical to SEQ ID NO: 16;

[0899] (iii) an antibody comprising a VH comprising an amino acid sequence at least 85% identical to SEQ ID NO: 23, and/or a VL comprising an amino acid sequence at least 85% identical to SEQ ID NO: 24;

[0900] (iv) an antibody comprising a VH comprising an amino acid sequence at least 85% identical to SEQ ID NO: 204, and/or a VL comprising an amino acid sequence at least 85% identical to SEQ ID NO: 205.

[0901] 9. The complex of any one of embodiments 1 to 8, wherein the equilibrium dissociation constant (K_{D}) of binding of the antibody to the transferrin receptor is in a range from 10⁻¹¹M to 10⁻⁶ M.

[0902] 10. The complex of any one of embodiments 1 to 9, wherein the antibody does not specifically bind to the transferrin binding site of the transferrin receptor and/or wherein the antibody does not inhibit binding of transferrin to the transferrin receptor.

[0903] 11. The complex of any one of embodiments 1 to 10, wherein the antibody is cross-reactive with extracellular epitopes of two or more of a human, non-human primate and rodent transferrin receptor.

[0904] 12. The complex of any one of embodiments 1 to 11, wherein the complex is configured to promote transferrin receptor mediated internalization of the molecular payload into a muscle cell.

[0905] 13. The complex of any one of embodiments 1 to 12, wherein the antibody is a chimeric antibody, optionally wherein the chimeric antibody is a humanized monoclonal antibody.

[0906] 14. The complex of any one of embodiments 1 to 13, wherein the antibody is in the form of a ScFv, Fab fragment, Fab′ fragment, F(ab′)₂ fragment, or Fv fragment.

[0907] 15. The complex of any one of embodiments 1 to 14, wherein the molecular payload is an oligonucleotide.

[0908] 16. The complex of embodiment 15, wherein the oligonucleotide comprises at least 15 consecutive nucleotides of a sequence comprising any one of SEQ ID NOs: 246-481 and 778-795.

[0909] 17. The complex of embodiment 16, wherein the oligonucleotide comprises a sequence comprising any one of SEQ ID NOs: 246-481 and 778-795.

[0910] 18. The complex of embodiment 17, wherein the oligonucleotide comprises a sequence comprising any one of SEQ ID NOs: 257, 260, 270, 272, 278, 280, 286, 288, 293, 294, 299, 301, 310, 313, 316, 320, 346, and 362.

[0911] 19. The complex of embodiment 18, wherein the oligonucleotide comprises a sequence comprising any one of SEQ ID NOs: 278, 310, and 320.

[0912] 20. The complex of any one of embodiments 1-14, wherein the oligonucleotide comprises a region of complementarity to any one of SEQ ID NO: 482-717.

[0913] 21. The complex of embodiment 20, wherein the oligonucleotide comprises a region of complementarity to at least 15 consecutive nucleotides of any one of SEQ ID NO: 482-717.

[0914] 22. The complex of any one of embodiments 15 to 21, wherein the oligonucleotide comprises a region of complementarity to the DMPK allele comprising the disease-associated-repeat expansion.

[0915] 23. The complex of any one of embodiments 1 to 14, wherein the molecular payload is a polypeptide.

[0916] 24. The complex of embodiment 23, wherein the polypeptide is a muscleblind-like (MBNL) polypeptide.

[0917] 25. The complex of any one of embodiments 15 to 22, wherein the oligonucleotide comprises an antisense strand that hybridizes, in a cell, with a wild-type DMPK mRNA transcript encoded by the allele, wherein the DMPK mRNA transcript comprises repeating units of a CUG trinucleotide sequence.

[0918] 26. The complex of any one of embodiments 15 to 22, wherein the oligonucleotide comprises an antisense strand that hybridizes, in a cell, with a mutant DMPK mRNA transcript encoded by the allele, wherein the DMPK mRNA transcript comprises repeating units of a CUG trinucleotide sequence.

[0919] 27. The complex of any one of embodiments 1 to 26, wherein the disease-associated-repeat is 38 to 200 repeating units in length.

[0920] 28. The complex of embodiment 27, wherein the disease-associated-repeat is associated with late onset myotonic dystrophy.

[0921] 29. The complex of any one of embodiments 1 to 26, wherein the disease-associated-repeat is 100 to 10,000 repeat units in length.

[0922] 30. The complex of embodiment 29, wherein the disease-associated-repeat is associated with congenital myotonic dystrophy.

[0923] 31. The complex of any one of embodiments 15 to 22 and 25 to 30, wherein the oligonucleotide comprises at least one modified internucleotide linkage.

[0924] 32. The complex of embodiment 31, wherein the at least one modified internucleotide linkage is a phosphorothioate linkage.

[0925] 33. The complex of embodiment 32, wherein the oligonucleotide comprises phosphorothioate linkages in the Rp stereochemical conformation and/or in the Sp stereochemical conformation.

[0926] 34. The complex of embodiment 33, wherein the oligonucleotide comprises phosphorothioate linkages that are all in the Rp stereochemical conformation or that are all in the Sp stereochemical conformation.

[0927] 35. The complex of any one of embodiments 15 to 22 and 25 to 34, wherein the oligonucleotide comprises one or more modified nucleotides.

[0928] 36. The complex of embodiment 35, wherein the one or more modified nucleotides are 2′-modified nucleotides.

[0929] 37. The complex of any one of embodiments 15 to 22 and 25 to 36, wherein the oligonucleotide is a gapmer oligonucleotide that directs RNAse H-mediated cleavage of a DMPK mRNA transcript in a cell.

[0930] 38. The complex of embodiment 37, wherein the gapmer oligonucleotide comprises a central portion of 5 to 15 deoxyribonucleotides flanked by wings of 2 to 8 modified nucleotides.

[0931] 39. The complex of embodiment 38, wherein the modified nucleotides of the wings are 2′-modified nucleotides.

[0932] 40. The complex of any one of embodiments 15 to 22 and 25 to 36, wherein the oligonucleotide is a mixmer oligonucleotide.

[0933] 41. The complex of embodiment 40, wherein the mixmer oligonucleotide inhibits binding of muscleblind-like protein 1, muscleblind-like protein 2, or muscleblind-like protein 3 to the DMPK mRNA transcript.

[0934] 42. The complex of embodiment 40 or 41, wherein the mixmer oligonucleotide comprises two or more different 2′ modified nucleotides.

[0935] 43. The complex of any one of embodiments 15 or 22 and 25 to 36, wherein the oligonucleotide is an RNAi oligonucleotide that promotes RNAi-mediated cleavage of the DMPK mRNA transcript.

[0936] 44. The complex of embodiment 43, wherein the RNAi oligonucleotide is a double-stranded oligonucleotide of 19 to 25 nucleotides in length.

[0937] 45. The complex of embodiment 43 or 44, wherein the RNAi oligonucleotide comprises at least one 2′ modified nucleotide.

[0938] 46. The complex of any one of embodiments 36, 39, 42, or 45, wherein each 2′ modified nucleotide is selected from the group consisting of: 2′-O-methyl, 2′-fluoro (2′-F), 2′-O-methoxyethyl (2′-MOE), and 2′, 4′-bridged nucleotides.

[0939] 47. The complex of embodiment 35, wherein the one or more modified nucleotides are bridged nucleotides.

[0940] 48. The complex of any one of embodiment 36, 39, 42, or 45, wherein at least one 2′ modified nucleotide is a 2′,4′-bridged nucleotide selected from: 2′,4′-constrained 2′-O-ethyl (cEt) and locked nucleic acid (LNA) nucleotides.

[0941] 49. The complex of any one of embodiments 15 to 22 and 25 to 36, wherein the oligonucleotide comprises a guide sequence for a genome editing nuclease.

[0942] 50. The complex of any one of embodiments 15 to 22 and 25 to 36, wherein the oligonucleotide is phosphorodiamidite morpholino oligomer.

[0943] 51. The complex of any one of embodiments 1 to 50, wherein the muscle-targeting agent is covalently linked to the molecular payload via a cleavable linker.

[0944] 52. The complex of embodiment 51, wherein the cleavable linker is selected from: a protease-sensitive linker, pH-sensitive linker, and glutathione-sensitive linker.

[0945] 53. The complex of embodiment 52, wherein the cleavable linker is a protease-sensitive linker.

[0946] 54. The complex of embodiment 53, wherein the protease-sensitive linker comprises a sequence cleavable by a lysosomal protease and/or an endosomal protease.

[0947] 55. The complex of embodiment 53, wherein the protease-sensitive linker comprises a valine-citrulline dipeptide sequence.

[0948] 56. The complex of embodiment 52, wherein the linker is pH-sensitive linker that is cleaved at a pH in a range of 4 to 6.

[0949] 57. The complex of any one of embodiments 1 to 50, wherein the muscle-targeting agent is covalently linked to the molecular payload via a non-cleavable linker.

[0950] 58. The complex of embodiment 57, wherein the non-cleavable linker is an alkane linker.

[0951] 59. The complex of any of embodiments 2 to 58, wherein the antibody comprises a non-natural amino acid to which the oligonucleotide is covalently linked.

[0952] 60. The complex of any of embodiments 2 to 58, wherein the antibody is covalently linked to the oligonucleotide via conjugation to a lysine residue or a cysteine residue of the antibody.

[0953] 61. The complex of embodiment 60, wherein the antibody is conjugated to the cysteine via a maleimide-containing linker, optionally wherein the maleimide-containing linker comprises a maleimidocaproyl or maleimidomethyl cyclohexane-1-carboxylate group.

[0954] 62. The complex of any one of embodiments 2 to 61, wherein the antibody is a glycosylated antibody that comprises at least one sugar moiety to which the oligonucleotide is covalently linked.

[0955] 63. The complex of embodiment 62, wherein the sugar moiety is a branched mannose.

[0956] 64. The complex of embodiment 62 or 63, wherein the antibody is a glycosylated antibody that comprises one to four sugar moieties each of which is covalently linked to a separate oligonucleotide.

[0957] 65. The complex of embodiment 62, wherein the antibody is a fully-glycosylated antibody.

[0958] 66. The complex of embodiment 62, wherein the antibody is a partially-glycosylated antibody.

[0959] 67. The complex of embodiment 66, wherein the partially-glycosylated antibody is produced via chemical or enzymatic means.

[0960] 68. The complex of embodiment 66, wherein the partially-glycosylated antibody is produced in a cell, cell that is deficient for an enzyme in the N- or O-glycosylation pathway.

[0961] 69. A method of delivering a molecular payload to a cell expressing transferrin receptor, the method comprising contacting the cell with the complex of any one of embodiments 1 to 68.

[0962] 70. A method of inhibiting activity of DMPK in a cell, the method comprising contacting the cell with the complex of any one of embodiments 1 to 68 in an amount effective for promoting internalization of the molecular payload to the cell.

[0963] 71. The method of embodiment 70, wherein the cell is in vitro.

[0964] 72. The method of embodiment 70, wherein the cell is in a subject.

[0965] 73. The method of embodiment 72, wherein the subject is a human.

[0966] 74. The method of any one of embodiments 70 to 73, wherein the complex inhibits the expression of DMPK.

[0967] 75. The method of any one of embodiments 70 to 74, wherein the cell is contacted with a single dose of the complex.

[0968] 76. The method of embodiment 75, wherein a single dose of the complex inhibits the expression of DMPK for at least two, four, eight, or twelve weeks.

[0969] 77. The method of embodiment 76, wherein the complex inhibits the expression of DMPK by at least 30%, 40%, 50%, or 60% relative to a control.

[0970] 78. The method of embodiment 76 or 77, the complex inhibits the expression of DMPK in muscle tissues by 40-60% for at least 12 weeks following administration of the single dose, relative to a control

[0971] 79. A method of treating a subject having an expansion of a disease-associated-repeat of a DMPK allele that is associated with myotonic dystrophy, the method comprising administering to the subject an effective amount of the complex of any one of embodiments 1 to 68.

[0972] 80. The method of embodiment 79, wherein the disease-associated-repeat comprises repeating units of a trinucleotide sequence.

[0973] 81. The method of embodiment 79, wherein the trinucleotide sequence is a CTG trinucleotide sequence.

[0974] 82. The method of any one of embodiments 79 to 81, wherein the disease-associated-repeat is 38 to 200 repeating units in length.

[0975] 83. The embodiment of 82, wherein the disease-associated-repeat is associated with late onset myotonic dystrophy.

[0976] 84. The method of any one of embodiments 79 to 81, wherein the disease-associated-repeat is 100 to 10,000 repeating units in length.

[0977] 85. The method of embodiment 84, wherein the disease-associated-repeat is associated with congenital myotonic dystrophy.

[0978] 86. The method of any one of embodiments 79 to 85, wherein administration of the complex results in inhibition of the expression of DMPK in muscle tissues.

[0979] 87. The method of any one of embodiments 79 to 86, wherein the complex is intravenously administered to the subject.

[0980] 88. The method of any one of embodiments 79 to 87, wherein an effective amount of the complex comprises 1-15 mg/kg of RNA.

[0981] 89. The method of any one of embodiments 79 to 88, wherein the complex is administered to the subject in a single dose.

[0982] 90. The method of embodiment 89, wherein administration of a single dose of the complex results in inhibition of the expression of DMPK in muscle tissues for at least two, four, eight, or twelve weeks.

[0983] 91. The method of embodiment 90, wherein the administration of a single dose of the complex results in inhibition of the expression of DMPK in muscle tissues by at least 30%, 40%, 50%, or 60% relative to a control.

[0984] 92. The method of embodiment 90 or 91, wherein the administration of a single dose of the complex results in inhibition of the expression of DMPK in muscle tissues for at least 12 weeks following administration of the single dose.

[0985] 93. The method of embodiment 92, wherein the administration of a single dose of the complex results in inhibition of the expression of DMPK in muscle tissues by 40-60%, relative to a control, for at least 12 weeks following administration of the single dose.

[0986] 94. The method of embodiment 90 or 91, wherein the administration of a single dose of the complex results in inhibition of the expression of DMPK in muscle tissues for a duration of time in the range of 4-8, 5-10, 8-12, 10-14, or 8-16 weeks following administration of the single dose.

[0987] 95. The method of embodiment 94, wherein the administration of a single dose of the complex results in inhibition of the expression of DMPK in muscle tissues by 40-60%, relative to a control, for a duration of time in the range of 4-8, 5-10, 8-12, 10-14, or 8-16 weeks following administration of the single dose.

[0988] 96. The method of embodiment 90 or 91, wherein the administration of a single dose of the complex results in inhibition of the expression of DMPK in muscle tissues by 40-60%, relative to a control, at 12 weeks following administration of the single dose.

[0989] 97. The method of any one of embodiments 79 to 88, wherein the complex is administered to the subject in a single dose once every 4-8, 5-10, 8-12, or 8-16 weeks.

[0990] 98. The method of embodiment 97, wherein the complex is administered to the subject in a single dose once every 12 weeks.

[0991] 99. The method of any one of embodiments 89 to 98, wherein the single dose comprises the complex at a concentration of 1-15 mg/kg of RNA.

[0992] 100. The method of embodiment 99, wherein the single dose comprises the complex at a concentration of 10 mg/kg of RNA.

[0993] 101. A method of treating a subject having an expansion of a disease-associated-repeat of a DMPK allele that is associated with myotonic dystrophy, the method comprising administering the complex of any one of embodiments 1 to 68 to the subject, wherein the administration results in inhibition of DMPK expression in muscle tissues by 40-60%, relative to a control, for a duration of time in the range of 4-8, 5-10, 8-12, 10-14, or 8-16 weeks following administration of the complex.

[0994] 102. A method of inhibiting DMPK expression in a subject, the method comprising administering the complex of any one of embodiments 1 to 68, wherein the administration results in inhibition of DMPK expression in muscle tissues by 40-60%, relative to a control, for a duration of time in the range of 4-8, 5-10, 8-12, 10-14, or 8-16 weeks following administration of the complex.

[0995] 103. The method of embodiment 101 or 102, wherein the molecular payload is an oligonucleotide.

[0996] 104. The method of embodiment 103, wherein the concentration of the complex is 1-15 mg/kg of RNA.

### Equivalents and Terminology

[0997] The disclosure illustratively described herein suitably can be practiced in the absence of any element or elements, limitation or limitations that are not specifically disclosed herein. Thus, for example, in each instance herein any of the terms “comprising”, “consisting essentially of”, and “consisting of” may be replaced with either of the other two terms. The terms and expressions which have been employed are used as terms of description and not of limitation, and there is no intention that in the use of such terms and expressions of excluding any equivalents of the features shown and described or portions thereof, but it is recognized that various modifications are possible within the scope of the disclosure. Thus, it should be understood that although the present disclosure has been specifically disclosed by preferred embodiments, optional features, modification and variation of the concepts herein disclosed may be resorted to by those skilled in the art, and that such modifications and variations are considered to be within the scope of this disclosure.

[0998] In addition, where features or aspects of the disclosure are described in terms of Markush groups or other grouping of alternatives, those skilled in the art will recognize that the disclosure is also thereby described in terms of any individual member or subgroup of members of the Markush group or other group.

[0999] It should be appreciated that, in some embodiments, sequences presented in the sequence listing may be referred to in describing the structure of an oligonucleotide or other nucleic acid. In such embodiments, the actual oligonucleotide or other nucleic acid may have one or more alternative nucleotides (e.g., an RNA counterpart of a DNA nucleotide or a DNA counterpart of an RNA nucleotide) and/or (e.g., and) one or more modified nucleotides and/or (e.g., and) one or more modified internucleotide linkages and/or (e.g., and) one or more other modification compared with the specified sequence while retaining essentially same or similar complementary properties as the specified sequence.

[1000] The use of the terms “a” and “an” and “the” and similar referents in the context of describing the invention (especially in the context of the following claims) are to be construed to cover both the singular and the plural, unless otherwise indicated herein or clearly contradicted by context. The terms “comprising,” “having,” “including,” and “containing” are to be construed as open-ended terms (i.e., meaning “including, but not limited to,”) unless otherwise noted. Recitation of ranges of values herein are merely intended to serve as a shorthand method of referring individually to each separate value falling within the range, unless otherwise indicated herein, and each separate value is incorporated into the specification as if it were individually recited herein. All methods described herein can be performed in any suitable order unless otherwise indicated herein or otherwise clearly contradicted by context. The use of any and all examples, or exemplary language (e.g., “such as”) provided herein, is intended merely to better illuminate the invention and does not pose a limitation on the scope of the invention unless otherwise claimed. No language in the specification should be construed as indicating any non-claimed element as essential to the practice of the invention.

[1001] Embodiments of this invention are described herein. Variations of those embodiments may become apparent to those of ordinary skill in the art upon reading the foregoing description.

[1002] The inventors expect skilled artisans to employ such variations as appropriate, and the inventors intend for the invention to be practiced otherwise than as specifically described herein. Accordingly, this invention includes all modifications and equivalents of the subject matter recited in the claims appended hereto as permitted by applicable law. Moreover, any combination of the above-described elements in all possible variations thereof is encompassed by the invention unless otherwise indicated herein or otherwise clearly contradicted by context. Those skilled in the art will recognize, or be able to ascertain using no more than routine experimentation, many equivalents to the specific embodiments of the invention described herein. Such equivalents are intended to be encompassed by the following claims.

1. A complex comprising an anti-transferrin receptor antibody covalently linked to a molecular payload configured for inhibiting DMPK expression or activity, wherein the antibody comprises a heavy chain complementarity determining region 1 (CDR-H1), a heavy chain complementarity determining region 2 (CDR-H2), a heavy chain complementarity determining region 3 (CDR-H3) of a heavy chain variable region (VH) comprising the amino acid sequence of SEQ ID NO: 54, and a light chain complementarity determining region 1 (CDR-L1), a light chain complementarity determining region 2 (CDR-L2), a light chain complementarity determining region 3 (CDR-L3) of a light chain variable region (VL) comprising the amino acid sequence of SEQ ID NO: 55.

2. The complex of claim 1, wherein the antibody comprises a CDR-H1 of SEQ ID NO: 49, a CDR-H2 of SEQ ID NO: 50, a CDR-H3 of SEQ ID NO: 51, a CDR-L1 of SEQ ID NO: 52, a CDR-L2 of SEQ ID NO: 29, and a CDR-L3 of SEQ ID NO: 53.

3. The complex of claim 1, wherein the antibody comprises human or humanized framework regions with the CDR-H1, the CDR-H2, the CDR-H3 of a VH as set forth in SEQ ID NO: 54, and the CDR-L1, the CDR-L2, the CDR-L3 of a VL as set forth in SEQ ID NO: 55.

4. The complex of claim 1, wherein the antibody comprises a VH comprising an amino acid sequence at least 80% identical to SEQ ID NO: 54, and a VL comprising an amino acid sequence at least 80% identical to SEQ ID NO: 55.

5. The complex of claim 1, wherein the equilibrium dissociation constant (K_{D}) of binding of the antibody to the transferrin receptor is in a range from 10⁻¹¹M to 10⁻⁶M.

6. The complex of claim 1, wherein the antibody is selected from the group consisting of a full-length IgG, a Fab fragment, a F(ab′) fragment, a F(ab′)₂ fragment, a scFv, and a Fv.

7. The complex of claim 1, wherein the molecular payload is an oligonucleotide.

8. The complex of claim 7, wherein the oligonucleotide comprises a region of complementarity to at least 15 consecutive nucleotides of SEQ ID NO: 727.

9. The complex of claim 7, wherein the oligonucleotide comprises a region of complementarity to at least 15 consecutive nucleotides of any one of SEQ ID NO: 482-717.

10. The complex of claim 7, wherein the oligonucleotide comprises at least 15 consecutive nucleotides of a sequence comprising any one of SEQ ID NOs: 246-481 and 778-795.

11. The complex of claim 7, wherein the oligonucleotide comprises at least one modified internucleoside linkage.

12. The complex of claim 7, wherein the oligonucleotide comprises one or more modified nucleosides.

13. The complex of claim 7, wherein the oligonucleotide is a gapmer oligonucleotide that directs RNAse H-mediated cleavage of a DMPK mRNA transcript.

14. The complex of claim 13, wherein the gapmer oligonucleotide comprises a 5′-X-Y-Z-3′ formula, and wherein:
X comprises 3-5 linked nucleosides, wherein at least one of the nucleosides in X is a 2′-modified nucleoside;
Y comprises 6-10 linked 2′-deoxyribonuclsides, wherein one or more of the nucleosides in the gap region Y is a modified nucleoside, and wherein one or more cytosines in the gap region Y are optionally 5-methyl-cytosines; and
Z comprises 3-5 linked nucleosides, wherein at least one of the nucleosides in Z is a 2′-modified nucleoside.

15. The complex of claim 14, wherein each nucleoside in X and Z is a 2′modified nucleoside.

16. The complex of claim 12, wherein the 2′ modified nucleotide is selected from the group consisting of: 2′-O-methyl (2′-O-Me), 2′-fluoro (2′-F), 2′-O-methoxyethyl (2′-MOE), and 2′, 4′-bicyclic nucleosides.

17. The complex of claim 1, wherein the muscle-targeting agent is covalently linked to the molecular payload via
(i) a cleavable linker; or
(ii) a non-cleavable linker.

18. The complex of claim 1, wherein the molecular payload is linked to the antibody via conjugation to a lysine residue or a cysteine residue of the antibody.

19. A method of inhibiting activity of DMPK in a cell, the method comprising contacting the cell with the complex of claim 1 in an amount effective for promoting internalization of the molecular payload to the cell.

20. A method of treating a subject having an expansion of a disease-associated-repeat of a DMPK allele that is associated with myotonic dystrophy type 1 (DM1), the method comprising administering to the subject an effective amount of the complex of claim 1.

The application's sequence listing, which the Patent Office published only in electronic form, follows.

SEQUENCE LISTING (3893 sequences)

SEQ ID NO: 1 - protein, 8 aa, Artificial Sequence
  Synthetic
GFNIKDDY

SEQ ID NO: 2 - protein, 8 aa, Artificial Sequence
  Synthetic
IDPENGDT

SEQ ID NO: 3 - protein, 10 aa, Artificial Sequence
  Synthetic
TLWLRRGLDY

SEQ ID NO: 4 - protein, 11 aa, Artificial Sequence
  Synthetic
KSLLHSNGYTY

SEQ ID NO: 5 - protein, 3 aa, Artificial Sequence
  Synthetic
RMS

SEQ ID NO: 6 - protein, 9 aa, Artificial Sequence
  Synthetic
MQHLEYPFT

SEQ ID NO: 7 - protein, 117 aa, Artificial Sequence
  Synthetic
EVQLQQSGAELVRPGASVKLSCTASGFNIKDDYMYWVKQRPEQGLEWIGWIDPENGDTEYASKFQDKATVTADTSSNTAYLQLSSLTSEDTAVYYCTLWLRRGLDYWGQGTSVTVSS

SEQ ID NO: 8 - protein, 112 aa, Artificial Sequence
  Synthetic
DIVMTQAAPSVPVTPGESVSISCRSSKSLLHSNGYTYLFWFLQRPGQSPQLLIYRMSNLASGVPDRFSGSGSGTAFTLRISRVEAEDVGVYYCMQHLEYPFTFGGGTKLEIK

SEQ ID NO: 9 - protein, 9 aa, Artificial Sequence
  Synthetic
GYSITSGYY

SEQ ID NO: 10 - protein, 7 aa, Artificial Sequence
  Synthetic
ITFDGAN

SEQ ID NO: 11 - protein, 12 aa, Artificial Sequence
  Synthetic
TRSSYDYDVLDY

SEQ ID NO: 12 - protein, 6 aa, Artificial Sequence
  Synthetic
QDISNF

SEQ ID NO: 13 - protein, 3 aa, Artificial Sequence
  Synthetic
YTS

SEQ ID NO: 14 - protein, 9 aa, Artificial Sequence
  Synthetic
QQGHTLPYT

SEQ ID NO: 15 - protein, 119 aa, Artificial Sequence
  Synthetic
DVQLQESGPGLVKPSQSLSLTCSVTGYSITSGYYWNWIRQFPGNKLEWMGYITFDGANNYNPSLKNRISITRDTSKNQFFLKLTSVTTEDTATYYCTRSSYDYDVLDYWGQGTTLTVSS

SEQ ID NO: 16 - protein, 107 aa, Artificial Sequence
  Synthetic
DIQMTQTTSSLSASLGDRVTISCRASQDISNFLNWYQQRPDGTVKLLIYYTSRLHSGVPSRFSGSGSGTDFSLTVSNLEQEDIATYFCQQGHTLPYTFGGGTKLEIK

SEQ ID NO: 17 - protein, 8 aa, Artificial Sequence
  Synthetic
GYSFTDYC

SEQ ID NO: 18 - protein, 8 aa, Artificial Sequence
  Synthetic
IYPGSGNT

SEQ ID NO: 19 - protein, 13 aa, Artificial Sequence
  Synthetic
AREDYYPYHGMDY

SEQ ID NO: 20 - protein, 10 aa, Artificial Sequence
  Synthetic
ESVDGYDNSF

SEQ ID NO: 21 - protein, 3 aa, Artificial Sequence
  Synthetic
RAS

SEQ ID NO: 22 - protein, 9 aa, Artificial Sequence
  Synthetic
QQSSEDPWT

SEQ ID NO: 23 - protein, 120 aa, Artificial Sequence
  Synthetic
QIQLQQSGPELVRPGASVKISCKASGYSFTDYCINWVNQRPGQGLEWIGWIYPGSGNTRYSERFKGKATLTVDTSSNTAYMQLSSLTSEDSAVYFCAREDYYPYHGMDYWGQGTSVTVSS

SEQ ID NO: 24 - protein, 111 aa, Artificial Sequence
  Synthetic
DIVLTQSPTSLAVSLGQRATISCRASESVDGYDNSFMHWYQQKPGQPPKLLIFRASNLESGIPARFSGSGSRTDFTLTINPVEAADVATYYCQQSSEDPWTFGGGTKLEIK

SEQ ID NO: 25 - protein, 8 aa, Artificial Sequence
  Synthetic
GYTFTSYW

SEQ ID NO: 26 - protein, 8 aa, Artificial Sequence
  Synthetic
IFPNSGRT

SEQ ID NO: 27 - protein, 11 aa, Artificial Sequence
  Synthetic
AREGNFGSLDY

SEQ ID NO: 28 - protein, 5 aa, Artificial Sequence
  Synthetic
SNLNY

SEQ ID NO: 29 - protein, 3 aa, Artificial Sequence
  Synthetic
DTS

SEQ ID NO: 30 - protein, 9 aa, Artificial Sequence
  Synthetic
QQWSRNPLT

SEQ ID NO: 31 - protein, 118 aa, Artificial Sequence
  Synthetic
QVHLQQPGAELVKPGASVKMSCKASGYTFTSYWITWVKQRPGQGLEWIGDIFPNSGRTNYDEKFKSKATLTVDTSSSTAYMQLSSLTSEDSAVYFCAREGNFGSLDYWGQGTTLTVSS

SEQ ID NO: 32 - protein, 106 aa, Artificial Sequence
  Synthetic
QIVLTQSPAIMSASPGEKVTMTCSANSNLNYMNWYHQKSGTSPKRWIYDTSKLASGVPARFSASGSGTSYSLTISSMEAEDAATYYCQQWSRNPLTFGAGTRLELK

SEQ ID NO: 33 - protein, 10 aa, Artificial Sequence
  Synthetic
GFSLNTYDVG

SEQ ID NO: 34 - protein, 7 aa, Artificial Sequence
  Synthetic
IWWNDDK

SEQ ID NO: 35 - protein, 11 aa, Artificial Sequence
  Synthetic
TLYSYDGGFAY

SEQ ID NO: 36 - protein, 7 aa, Artificial Sequence
  Synthetic
SSVSSSY

SEQ ID NO: 37 - protein, 3 aa, Artificial Sequence
  Synthetic
STS

SEQ ID NO: 38 - protein, 9 aa, Artificial Sequence
  Synthetic
HQYHRSPYT

SEQ ID NO: 39 - protein, 119 aa, Artificial Sequence
  Synthetic
QVTLKESGPGMLQPSQTLSLTCSFSGFSLNTYDVGVGWIRQPSGKGLEWLANIWWNDDKYYNSALKSRLTISKDTSNNQVFLKISSVDTADTATYYCTLYSYDGGFAYWGQGTLVTVSA

SEQ ID NO: 40 - protein, 108 aa, Artificial Sequence
  Synthetic
QIVLTQSPAIMSASLGERVTMTCTASSSVSSSYLHWYQQKPGSSPKLWIYSTSNLASGVPARFSGSGSGTSYSLTISSMEAEDAATYYCHQYHRSPYTFGGGTKLEIK

SEQ ID NO: 41 - protein, 8 aa, Artificial Sequence
  Synthetic
GYSFTGYN

SEQ ID NO: 42 - protein, 8 aa, Artificial Sequence
  Synthetic
INPYYGST

SEQ ID NO: 43 - protein, 15 aa, Artificial Sequence
  Synthetic
ARGDYGYDEGTWFAY

SEQ ID NO: 44 - protein, 12 aa, Artificial Sequence
  Synthetic
QSLLNSRTRKNY

SEQ ID NO: 45 - protein, 3 aa, Artificial Sequence
  Synthetic
WAS

SEQ ID NO: 46 - protein, 9 aa, Artificial Sequence
  Synthetic
KQSYNLPFT

SEQ ID NO: 47 - protein, 122 aa, Artificial Sequence
  Synthetic
EIQMKQSGAELVKPGASVKISCKASGYSFTGYNMNWVKQSHGKSLEWIGNINPYYGSTGYNQKFKGKATLTVDKSSSTAYMQLNSLTSEDSAVYYCARGDYGYDEGTWFAYWGQGTLVTVSA

SEQ ID NO: 48 - protein, 113 aa, Artificial Sequence
  Synthetic
DIVMSQSPSSLAVSAGEKVTMSCKSSQSLLNSRTRKNYLAWYQQKPEQSPKLLIYWASTRESGVPDRFTGSGSGTDFTLTISSVQAEDLAVYYCKQSYNLPFTFGSGTKLEIK

SEQ ID NO: 49 - protein, 8 aa, Artificial Sequence
  Synthetic
GYTFTRHW

SEQ ID NO: 50 - protein, 8 aa, Artificial Sequence
  Synthetic
IYPGSGRT

SEQ ID NO: 51 - protein, 13 aa, Artificial Sequence
  Synthetic
ARDGYLYINYFDY

SEQ ID NO: 52 - protein, 5 aa, Artificial Sequence
  Synthetic
SSVSF

SEQ ID NO: 53 - protein, 9 aa, Artificial Sequence
  Synthetic
FQGSGYPYT

SEQ ID NO: 54 - protein, 120 aa, Artificial Sequence
  Synthetic
QVQLQQPGAELVKPGASVKMSCKASGYTFTRHWITWVKQRPGQGLEWIGDIYPGSGRTNYNEKFKSTATLTVDTSSSTAYMQLSSLTSEDSAVYYCARDGYLYINYFDYWGQGTTLTVSS

SEQ ID NO: 55 - protein, 106 aa, Artificial Sequence
  Synthetic
ENVLTQSPAIMSASPGEKVTMTCSASSSVSFMHWFQQKSSTSPKLWIYDTSKLASGVPGRFSGSGSGSSYSLTISSMAAEDVATYYCFQGSGYPYTFGGGTKLEIK

SEQ ID NO: 56 - protein, 8 aa, Artificial Sequence
  Synthetic
GFNIVDDY

SEQ ID NO: 57 - protein, 8 aa, Artificial Sequence
  Synthetic
IYPENADT

SEQ ID NO: 58 - protein, 11 aa, Artificial Sequence
  Synthetic
TTATGTGWFAY

SEQ ID NO: 59 - protein, 11 aa, Artificial Sequence
  Synthetic
QSLLDSDGKTY

SEQ ID NO: 60 - protein, 3 aa, Artificial Sequence
  Synthetic
LVS

SEQ ID NO: 61 - protein, 9 aa, Artificial Sequence
  Synthetic
WQGTHFPWT

SEQ ID NO: 62 - protein, 118 aa, Artificial Sequence
  Synthetic
EVQLQQSGAELVRPGASVKLSCTASGFNIVDDYMHWVKQRPEQGLEWIGWIYPENADTEYASKFQGKATITADTSSNTAYLQLSSLTSEDTAVYYCTTATGTGWFAYWGQGTLVTVSA

SEQ ID NO: 63 - protein, 112 aa, Artificial Sequence
  Synthetic
DVVMTQTPLTLSVTIGQPASISCKSSQSLLDSDGKTYLNWLFQRPGQSPKRLIYLVSKLDSGVPDRFTGSGSGTDFTLKISRVETEDLGVYYCWQGTHFPWTFGGGAKLEIK

SEQ ID NO: 64 - protein, 8 aa, Artificial Sequence
  Synthetic
GYTFSNYW

SEQ ID NO: 65 - protein, 8 aa, Artificial Sequence
  Synthetic
ILPGSGST

SEQ ID NO: 66 - protein, 11 aa, Artificial Sequence
  Synthetic
ARRGAYGNFHY

SEQ ID NO: 67 - protein, 7 aa, Artificial Sequence
  Synthetic
SSISSSN

SEQ ID NO: 68 - protein, 3 aa, Artificial Sequence
  Synthetic
GTS

SEQ ID NO: 69 - protein, 9 aa, Artificial Sequence
  Synthetic
QQWRSYPYT

SEQ ID NO: 70 - protein, 118 aa, Artificial Sequence
  Synthetic
QVQLQQSGAELMKPGASVKISCKATGYTFSNYWIEWVKQRPGHGLEWIGEILPGSGSTNYNENFKGKATFTADTSSNTAYMQLSSLTSEDSAVYYCARRGAYGNFHYWGQGTTLTVSS

SEQ ID NO: 71 - protein, 108 aa, Artificial Sequence
  Synthetic
EIVLTQSPALMAASPGEKVTITCSVSSSISSSNLHWYQQKSETSPKPWIYGTSNLASGVPVRFSGSGSGTSYSLTISSMEAEDAATYYCQQWRSYPYTFGGGTKLEIK

SEQ ID NO: 72 - protein, 8 aa, Artificial Sequence
  Synthetic
GYTFTDYN

SEQ ID NO: 73 - protein, 8 aa, Artificial Sequence
  Synthetic
INPNYDTT

SEQ ID NO: 74 - protein, 16 aa, Artificial Sequence
  Synthetic
ARSGYYGSSYYWHFDV

SEQ ID NO: 75 - protein, 12 aa, Artificial Sequence
  Synthetic
QSLLYSSNQKNY

SEQ ID NO: 76 - protein, 9 aa, Artificial Sequence
  Synthetic
QQYYNYPFT

SEQ ID NO: 77 - protein, 123 aa, Artificial Sequence
  Synthetic
EVQLQQFGAELVKPGASVKISCKASGYTFTDYNMAWVKESHGKSLEWIGDINPNYDTTSYNQKFKGKATLTVDKSSSTAHMELRSLTSEGTAVYYCARSGYYGSSYYWHFDVWGTGTTVTVSS

SEQ ID NO: 78 - protein, 113 aa, Artificial Sequence
  Synthetic
DIVMSQSPSSLAVSVGEKVTMSCKSSQSLLYSSNQKNYLAWYQQKPGQSPKLLIYWASTRESGVPDRFTGSGSGTDFTLTISSVKAEDLAVYYCQQYYNYPFTFGSGTKLEIK

SEQ ID NO: 79 - protein, 8 aa, Artificial Sequence
  Synthetic
GFNIKDYY

SEQ ID NO: 80 - protein, 8 aa, Artificial Sequence
  Synthetic
IDPESGDT

SEQ ID NO: 81 - protein, 9 aa, Artificial Sequence
  Synthetic
YGHDYRVDC

SEQ ID NO: 82 - protein, 11 aa, Artificial Sequence
  Synthetic
QSLVHSNGNTY

SEQ ID NO: 83 - protein, 3 aa, Artificial Sequence
  Synthetic
KVS

SEQ ID NO: 84 - protein, 9 aa, Artificial Sequence
  Synthetic
SQSTHIPWT

SEQ ID NO: 85 - protein, 116 aa, Artificial Sequence
  Synthetic
EVQLQQSGAELVRSGASVKLSCTASGFNIKDYYMHWVKQRPEQGLEWIGWIDPESGDTEYAPKFQGRATMTADTSSNTAYMQLSSLTSEDTAVYYCYGHDYRVDCWGQGTSVTVSS

SEQ ID NO: 86 - protein, 112 aa, Artificial Sequence
  Synthetic
DVVMTQTPLSLPVSLGDQASISCRSSQSLVHSNGNTYLHWYLQKPGQSPKLLIYKVSNRFSGVPDRFSGSGSGTDFTLKISRVEAEDLGVYFCSQSTHIPWTFGGGTKLEIK

SEQ ID NO: 87 - protein, 8 aa, Artificial Sequence
  Synthetic
INPNYDST

SEQ ID NO: 88 - protein, 9 aa, Artificial Sequence
  Synthetic
QQYYHYPFT

SEQ ID NO: 89 - protein, 123 aa, Artificial Sequence
  Synthetic
EVQLQQFGAELVKPGASVKISCKASGYTFTDYNMGWVKQSHGKSLEWIGDINPNYDSTSYTQKFKGKATLTVDKSSSTAYMELRSLTSEDTAVYYCARSGYYGSSYYWHFDVWGTGTTVTVSS

SEQ ID NO: 90 - protein, 113 aa, Artificial Sequence
  Synthetic
DIVMSQSPSSLAVSVGEKVTMSCKSSQSLLYSSNQKNYLAWYQQKPGQSPKLLIYWASTRESGVPDRFTGSGSGTDFTLTISSVKAEDLAVYYCQQYYHYPFTFGSGTKLEIK

SEQ ID NO: 91 - protein, 8 aa, Artificial Sequence
  Synthetic
GFSLTNYG

SEQ ID NO: 92 - protein, 7 aa, Artificial Sequence
  Synthetic
IWNDGSA

SEQ ID NO: 93 - protein, 11 aa, Artificial Sequence
  Synthetic
ARHESSNPFAY

SEQ ID NO: 94 - protein, 6 aa, Artificial Sequence
  Synthetic
QSIGTS

SEQ ID NO: 95 - protein, 3 aa, Artificial Sequence
  Synthetic
SAS

SEQ ID NO: 96 - protein, 9 aa, Artificial Sequence
  Synthetic
QQNNRWPYT

SEQ ID NO: 97 - protein, 117 aa, Artificial Sequence
  Synthetic
QVQLKESGPGLVAPSQSLSITCTVSGFSLTNYGVHWVRQPPGKGLEWLVVIWNDGSATYNSALESRLSISKDNSKSQVFLKMNSLQTDDTAMYYCARHESSNPFAYWGQGTLVTVSA

SEQ ID NO: 98 - protein, 107 aa, Artificial Sequence
  Synthetic
DILLTQSPAILSVSPGERVSFSCRASQSIGTSIHWYQQRTNGSPRLLIKSASESIAGIPSRFSGSGSGTDFTLSINSVESEDIADYYCQQNNRWPYTFGGGTKLEIK

SEQ ID NO: 99 - protein, 8 aa, Artificial Sequence
  Synthetic
DFNIKDDY

SEQ ID NO: 100 - protein, 8 aa, Artificial Sequence
  Synthetic
IDPANGNT

SEQ ID NO: 101 - protein, 6 aa, Artificial Sequence
  Synthetic
ALGYTY

SEQ ID NO: 102 - protein, 11 aa, Artificial Sequence
  Synthetic
QSLLHSYGKTY

SEQ ID NO: 103 - protein, 9 aa, Artificial Sequence
  Synthetic
LQTTHFPQT

SEQ ID NO: 104 - protein, 113 aa, Artificial Sequence
  Synthetic
EVQLQQSGAELVRPGASVKLSCTASDFNIKDDYIHWVKQRPEQGLEWIGRIDPANGNTKYAPKFQDKATITADTSSNTAYLQLSSLTSEDTAVYYCALGYTYWGQGTTLTVSS

SEQ ID NO: 105 - protein, 112 aa, Artificial Sequence
  Synthetic
DVVMTQTPLTLSVTIGQPASISCKSSQSLLHSYGKTYLNWLLQRPGQSPKLLIYLVSKLESGVPDRFSGSGSGTDFTLKISRVEAEDLGVYYCLQTTHFPQTFGGGTKLEIK

SEQ ID NO: 106 - protein, 8 aa, Artificial Sequence
  Synthetic
GFTFSDYG

SEQ ID NO: 107 - protein, 8 aa, Artificial Sequence
  Synthetic
INSGSSTI

SEQ ID NO: 108 - protein, 13 aa, Artificial Sequence
  Synthetic
ARPGDYDNYAMDY

SEQ ID NO: 109 - protein, 6 aa, Artificial Sequence
  Synthetic
QDVSVA

SEQ ID NO: 110 - protein, 3 aa, Artificial Sequence
  Synthetic
WAY

SEQ ID NO: 111 - protein, 10 aa, Artificial Sequence
  Synthetic
QQHYNTPPWT

SEQ ID NO: 112 - protein, 120 aa, Artificial Sequence
  Synthetic
EVQLVESGGDLVKPGGSLKLSCAASGFTFSDYGMHWVRQGPEKGLEWVAYINSGSSTIYYADTVKGRFTISRDNAKNTLFLQMTSLRSEDTAMYYCARPGDYDNYAMDYWGQGTSVTVSS

SEQ ID NO: 113 - protein, 108 aa, Artificial Sequence
  Synthetic
DIVMTQSHKFLSTSVGDRVSITCKASQDVSVAVAWYQQKPGQSPKLLIYWAYTRHTGVPDRFTGSGSGTEYTLTISSVQAEDLALYYCQQHYNTPPWTFGGGTKLEIK

SEQ ID NO: 114 - protein, 8 aa, Artificial Sequence
  Synthetic
IDPENADT

SEQ ID NO: 115 - protein, 9 aa, Artificial Sequence
  Synthetic
YAWDYSMDY

SEQ ID NO: 116 - protein, 9 aa, Artificial Sequence
  Synthetic
SQNTHVPYT

SEQ ID NO: 117 - protein, 116 aa, Artificial Sequence
  Synthetic
EVQLQQSGAELVRSGASVKLSCTASGFNIKDYYIHWVKQRPEQGLEWIGWIDPENADTEYAPKFQGKATMTPDTSSNTAYLQLSSLTSEDTAVYYCYAWDYSMDYWGQGTSVTVSS

SEQ ID NO: 118 - protein, 112 aa, Artificial Sequence
  Synthetic
DVVMTQTPLSLSVSLGDQASISCRSSQSLVHSNGNTYLHWYLQKPGQSPKLLIYKVSNRFSGVPDRFSGSGSGTDFILKISRVEAEDLGVYFCSQNTHVPYTFGGGTRLEIK

SEQ ID NO: 119 - protein, 8 aa, Artificial Sequence
  Synthetic
GFTFTDYG

SEQ ID NO: 120 - protein, 8 aa, Artificial Sequence
  Synthetic
IYPSSGNS

SEQ ID NO: 121 - protein, 12 aa, Artificial Sequence
  Synthetic
ARSTYYGSPIDY

SEQ ID NO: 122 - protein, 6 aa, Artificial Sequence
  Synthetic
QDVDTT

SEQ ID NO: 123 - protein, 9 aa, Artificial Sequence
  Synthetic
QQYSTYPLT

SEQ ID NO: 124 - protein, 119 aa, Artificial Sequence
  Synthetic
QVQLQQSGTELARPGASVKLSCKASGFTFTDYGINWVKQRTGQGLEWIGEIYPSSGNSYYNEKFKAKATLTADKSSSTAYMELRSLTSEDSAVYFCARSTYYGSPIDYWGQGTTLTVSS

SEQ ID NO: 125 - protein, 107 aa, Artificial Sequence
  Synthetic
DIVMTQSHKFMSTPVGDRVSITCKASQDVDTTVAWYQQKPGQSPKLLIYWASTRQIGVPDRFTGSGSGTDFTLTISNVQSEDLADYFCQQYSTYPLTFGGGTKLEIK

SEQ ID NO: 126 - protein, 8 aa, Artificial Sequence
  Synthetic
GFSLTSYA

SEQ ID NO: 127 - protein, 7 aa, Artificial Sequence
  Synthetic
IWTGGGT

SEQ ID NO: 128 - protein, 13 aa, Artificial Sequence
  Synthetic
ARIYDGYYRYFDV

SEQ ID NO: 129 - protein, 6 aa, Artificial Sequence
  Synthetic
QSVSND

SEQ ID NO: 130 - protein, 3 aa, Artificial Sequence
  Synthetic
YAS

SEQ ID NO: 131 - protein, 9 aa, Artificial Sequence
  Synthetic
QQDYSSPWT

SEQ ID NO: 132 - protein, 119 aa, Artificial Sequence
  Synthetic
QVQLKESGPGLVAPSQSLSITCTVSGFSLTSYAITWVRQSPGKGLEWLGLIWTGGGTNYNSALKSRLSISKDNSKSQVFLKMNSLQTDDTARYYCARIYDGYYRYFDVWGTGTTVTVSS

SEQ ID NO: 133 - protein, 107 aa, Artificial Sequence
  Synthetic
RIVLTQTPKFLLVSAGDRVTMTCKASQSVSNDVAWYQQKPGQSPKLLIYYASNRYTGVPDRFTGSGYGTDFTFTISTVQAEDLAVYFCQQDYSSPWTFGGGTKLEIK

SEQ ID NO: 134 - protein, 9 aa, Artificial Sequence
  Synthetic
NVLTMPTAY

SEQ ID NO: 135 - protein, 9 aa, Artificial Sequence
  Synthetic
QQYYSYPYT

SEQ ID NO: 136 - protein, 116 aa, Artificial Sequence
  Synthetic
EVQLQQSGAELVRSGASVKLSCTASGFNIKDYYMHWVKQRPEQGLDWIGWIDPENGDTEYAPKFQGKATMTADTSSNTAYLQLSSLTSEDTAVYYCNVLTMPTAYWGQGTLVTVSA

SEQ ID NO: 137 - protein, 113 aa, Artificial Sequence
  Synthetic
DIVMSQSPSSLAVSVGEKVIMSCKSSQSLLYSSNQKNYLAWYQQKPGQSPKLLIYWASTRESGVPDRFTGSGSGTDFTLTISSVKAEDLAVYYCQQYYSYPYTFGGGTKLEIK

SEQ ID NO: 138 - protein, 8 aa, Artificial Sequence
  Synthetic
GFTFSSYG

SEQ ID NO: 139 - protein, 8 aa, Artificial Sequence
  Synthetic
ITSGGSYT

SEQ ID NO: 140 - protein, 7 aa, Artificial Sequence
  Synthetic
ALWSLDY

SEQ ID NO: 141 - protein, 5 aa, Artificial Sequence
  Synthetic
SSLSY

SEQ ID NO: 142 - protein, 9 aa, Artificial Sequence
  Synthetic
HQRRSYPWT

SEQ ID NO: 143 - protein, 114 aa, Artificial Sequence
  Synthetic
EVQLMESGGDLVKPGGSLKLSCAASGFTFSSYGLSWVRQTPDKRLEWVATITSGGSYTYYPDSVKGRFTISRDNARNTLYLQMFSLKSEDTAMYYCALWSLDYWGQGTTLTVSS

SEQ ID NO: 144 - protein, 106 aa, Artificial Sequence
  Synthetic
QIVLTQSPAIMSASPGEKVTMTCSANSSLSYMHWYQQKPGTSPKRWIYDTSELASGVPARFSGSGSGTSYSLTISSMEAEDAATYYCHQRRSYPWTFGGGTKLEIK

SEQ ID NO: 145 - protein, 5 aa, Artificial Sequence
  Synthetic
DDYMY

SEQ ID NO: 146 - protein, 17 aa, Artificial Sequence
  Synthetic
WIDPENGDTEYASKFQD

SEQ ID NO: 147 - protein, 8 aa, Artificial Sequence
  Synthetic
WLRRGLDY

SEQ ID NO: 148 - protein, 16 aa, Artificial Sequence
  Synthetic
RSSKSLLHSNGYTYLF

SEQ ID NO: 149 - protein, 7 aa, Artificial Sequence
  Synthetic
RMSNLAS

SEQ ID NO: 150 - protein, 7 aa, Artificial Sequence
  Synthetic
GFNIKDD

SEQ ID NO: 151 - protein, 3 aa, Artificial Sequence
  Synthetic
ENG

SEQ ID NO: 152 - protein, 6 aa, Artificial Sequence
  Synthetic
LRRGLD

SEQ ID NO: 153 - protein, 12 aa, Artificial Sequence
  Synthetic
SKSLLHSNGYTY

SEQ ID NO: 154 - protein, 6 aa, Artificial Sequence
  Synthetic
HLEYPF

SEQ ID NO: 155 - protein, 6 aa, Artificial Sequence
  Synthetic
SGYYWN

SEQ ID NO: 156 - protein, 16 aa, Artificial Sequence
  Synthetic
YITFDGANNYNPSLKN

SEQ ID NO: 157 - protein, 10 aa, Artificial Sequence
  Synthetic
SSYDYDVLDY

SEQ ID NO: 158 - protein, 11 aa, Artificial Sequence
  Synthetic
RASQDISNFLN

SEQ ID NO: 159 - protein, 7 aa, Artificial Sequence
  Synthetic
YTSRLHS

SEQ ID NO: 160 - protein, 8 aa, Artificial Sequence
  Synthetic
GYSITSGY

SEQ ID NO: 161 - protein, 3 aa, Artificial Sequence
  Synthetic
FDG

SEQ ID NO: 162 - protein, 8 aa, Artificial Sequence
  Synthetic
SYDYDVLD

SEQ ID NO: 163 - protein, 7 aa, Artificial Sequence
  Synthetic
SQDISNF

SEQ ID NO: 164 - protein, 6 aa, Artificial Sequence
  Synthetic
GHTLPY

SEQ ID NO: 165 - protein, 5 aa, Artificial Sequence
  Synthetic
DYCIN

SEQ ID NO: 166 - protein, 17 aa, Artificial Sequence
  Synthetic
WIYPGSGNTRYSERFKG

SEQ ID NO: 167 - protein, 11 aa, Artificial Sequence
  Synthetic
EDYYPYHGMDY

SEQ ID NO: 168 - protein, 15 aa, Artificial Sequence
  Synthetic
RASESVDGYDNSFMH

SEQ ID NO: 169 - protein, 7 aa, Artificial Sequence
  Synthetic
RASNLES

SEQ ID NO: 170 - protein, 7 aa, Artificial Sequence
  Synthetic
GYSFTDY

SEQ ID NO: 171 - protein, 3 aa, Artificial Sequence
  Synthetic
GSG

SEQ ID NO: 172 - protein, 9 aa, Artificial Sequence
  Synthetic
DYYPYHGMD

SEQ ID NO: 173 - protein, 11 aa, Artificial Sequence
  Synthetic
SESVDGYDNSF

SEQ ID NO: 174 - protein, 6 aa, Artificial Sequence
  Synthetic
SSEDPW

SEQ ID NO: 175 - protein, 330 aa, Homo sapiens [sequence omitted]

SEQ ID NO: 176 - protein, 330 aa, Artificial Sequence
  Synthetic
ASTKGPSVFPLAPSSKSTSGGTAALGCLVKDYFPEPVTVSWNSGALTSGVHTFPAVLQSSGLYSLSSVVTVPSSSLGTQTYICNVNHKPSNTKVDKKVEPKSCDKTHTCPPCPAPEAAGGPSVFLFPPKPKDTLMISRTPEVTCVVVDVSHEDPEVKFNWYVDGVEVHNAKTKPREEQYNSTYRVVSVLTVLHQDWLNGKEYKCKVSNKALPAPIEKTISKAKGQPREPQVYTLPPSRDELTKNQVSLTCLVKGFYPSDIAVEWESNGQPENNYKTTPPVLDSDGSFFLYSKLTVDKSRWQQGNVFSCSVMHEALHNHYTQKSLSLSPGK

SEQ ID NO: 177 - protein, 107 aa, Artificial Sequence [sequence omitted]

SEQ ID NO: 178 - protein, 447 aa, Artificial Sequence
  Synthetic
EVQLQQSGAELVRPGASVKLSCTASGFNIKDDYMYWVKQRPEQGLEWIGWIDPENGDTEYASKFQDKATVTADTSSNTAYLQLSSLTSEDTAVYYCTLWLRRGLDYWGQGTSVTVSSASTKGPSVFPLAPSSKSTSGGTAALGCLVKDYFPEPVTVSWNSGALTSGVHTFPAVLQSSGLYSLSSVVTVPSSSLGTQTYICNVNHKPSNTKVDKKVEPKSCDKTHTCPPCPAPELLGGPSVFLFPPKPKDTLMISRTPEVTCVVVDVSHEDPEVKFNWYVDGVEVHNAKTKPREEQYNSTYRVVSVLTVLHQDWLNGKEYKCKVSNKALPAPIEKTISKAKGQPREPQVYTLPPSRDELTKNQVSLTCLVKGFYPSDIAVEWESNGQPENNYKTTPPVLDSDGSFFLYSKLTVDKSRWQQGNVFSCSVMHEALHNHYTQKSLSLSPGK

SEQ ID NO: 179 - protein, 219 aa, Artificial Sequence
  Synthetic
DIVMTQAAPSVPVTPGESVSISCRSSKSLLHSNGYTYLFWFLQRPGQSPQLLIYRMSNLASGVPDRFSGSGSGTAFTLRISRVEAEDVGVYYCMQHLEYPFTFGGGTKLEIKRTVAAPSVFIFPPSDEQLKSGTASVVCLLNNFYPREAKVQWKVDNALQSGNSQESVTEQDSKDSTYSLSSTLTLSKADYEKHKVYACEVTHQGLSSPVTKSFNRGEC

SEQ ID NO: 180 - protein, 449 aa, Artificial Sequence
  Synthetic
DVQLQESGPGLVKPSQSLSLTCSVTGYSITSGYYWNWIRQFPGNKLEWMGYITFDGANNYNPSLKNRISITRDTSKNQFFLKLTSVTTEDTATYYCTRSSYDYDVLDYWGQGTTLTVSSASTKGPSVFPLAPSSKSTSGGTAALGCLVKDYFPEPVTVSWNSGALTSGVHTFPAVLQSSGLYSLSSVVTVPSSSLGTQTYICNVNHKPSNTKVDKKVEPKSCDKTHTCPPCPAPELLGGPSVFLFPPKPKDTLMISRTPEVTCVVVDVSHEDPEVKFNWYVDGVEVHNAKTKPREEQYNSTYRVVSVLTVLHQDWLNGKEYKCKVSNKALPAPIEKTISKAKGQPREPQVYTLPPSRDELTKNQVSLTCLVKGFYPSDIAVEWESNGQPENNYKTTPPVLDSDGSFFLYSKLTVDKSRWQQGNVFSCSVMHEALHNHYTQKSLSLSPGK

SEQ ID NO: 181 - protein, 214 aa, Artificial Sequence
  Synthetic
DIQMTQTTSSLSASLGDRVTISCRASQDISNFLNWYQQRPDGTVKLLIYYTSRLHSGVPSRFSGSGSGTDFSLTVSNLEQEDIATYFCQQGHTLPYTFGGGTKLEIKRTVAAPSVFIFPPSDEQLKSGTASVVCLLNNFYPREAKVQWKVDNALQSGNSQESVTEQDSKDSTYSLSSTLTLSKADYEKHKVYACEVTHQGLSSPVTKSFNRGEC

SEQ ID NO: 182 - protein, 450 aa, Artificial Sequence
  Synthetic
QIQLQQSGPELVRPGASVKISCKASGYSFTDYCINWVNQRPGQGLEWIGWIYPGSGNTRYSERFKGKATLTVDTSSNTAYMQLSSLTSEDSAVYFCAREDYYPYHGMDYWGQGTSVTVSSASTKGPSVFPLAPSSKSTSGGTAALGCLVKDYFPEPVTVSWNSGALTSGVHTFPAVLQSSGLYSLSSVVTVPSSSLGTQTYICNVNHKPSNTKVDKKVEPKSCDKTHTCPPCPAPELLGGPSVFLFPPKPKDTLMISRTPEVTCVVVDVSHEDPEVKFNWYVDGVEVHNAKTKPREEQYNSTYRVVSVLTVLHQDWLNGKEYKCKVSNKALPAPIEKTISKAKGQPREPQVYTLPPSRDELTKNQVSLTCLVKGFYPSDIAVEWESNGQPENNYKTTPPVLDSDGSFFLYSKLTVDKSRWQQGNVFSCSVMHEALHNHYTQKSLSLSPGK

SEQ ID NO: 183 - protein, 218 aa, Artificial Sequence
  Synthetic
DIVLTQSPTSLAVSLGQRATISCRASESVDGYDNSFMHWYQQKPGQPPKLLIFRASNLESGIPARFSGSGSRTDFTLTINPVEAADVATYYCQQSSEDPWTFGGGTKLEIKRTVAAPSVFIFPPSDEQLKSGTASVVCLLNNFYPREAKVQWKVDNALQSGNSQESVTEQDSKDSTYSLSSTLTLSKADYEKHKVYACEVTHQGLSSPVTKSFNRGEC

SEQ ID NO: 184 - protein, 108 aa, Artificial Sequence
  Synthetic
ASTKGPSVFPLAPSSKSTSGGTAALGCLVKDYFPEPVTVSWNSGALTSGVHTFPAVLQSSGLYSLSSVVTVPSSSLGTQTYICNVNHKPSNTKVDKKVEPKSCDKTHT

SEQ ID NO: 185 - protein, 225 aa, Artificial Sequence
  Synthetic
EVQLQQSGAELVRPGASVKLSCTASGFNIKDDYMYWVKQRPEQGLEWIGWIDPENGDTEYASKFQDKATVTADTSSNTAYLQLSSLTSEDTAVYYCTLWLRRGLDYWGQGTSVTVSSASTKGPSVFPLAPSSKSTSGGTAALGCLVKDYFPEPVTVSWNSGALTSGVHTFPAVLQSSGLYSLSSVVTVPSSSLGTQTYICNVNHKPSNTKVDKKVEPKSCDKTHT

SEQ ID NO: 186 - protein, 227 aa, Artificial Sequence
  Synthetic
DVQLQESGPGLVKPSQSLSLTCSVTGYSITSGYYWNWIRQFPGNKLEWMGYITFDGANNYNPSLKNRISITRDTSKNQFFLKLTSVTTEDTATYYCTRSSYDYDVLDYWGQGTTLTVSSASTKGPSVFPLAPSSKSTSGGTAALGCLVKDYFPEPVTVSWNSGALTSGVHTFPAVLQSSGLYSLSSVVTVPSSSLGTQTYICNVNHKPSNTKVDKKVEPKSCDKTHT

SEQ ID NO: 187 - protein, 228 aa, Artificial Sequence
  Synthetic
QIQLQQSGPELVRPGASVKISCKASGYSFTDYCINWVNQRPGQGLEWIGWIYPGSGNTRYSERFKGKATLTVDTSSNTAYMQLSSLTSEDSAVYFCAREDYYPYHGMDYWGQGTSVTVSSASTKGPSVFPLAPSSKSTSGGTAALGCLVKDYFPEPVTVSWNSGALTSGVHTFPAVLQSSGLYSLSSVVTVPSSSLGTQTYICNVNHKPSNTKVDKKVEPKSCDKTHT

SEQ ID NO: 188 - protein, 8 aa, Artificial Sequence
  Synthetic
GYSFTSYW

SEQ ID NO: 189 - protein, 8 aa, Artificial Sequence
  Synthetic
IYPGDSDT

SEQ ID NO: 190 - protein, 15 aa, Artificial Sequence
  Synthetic
ARFPYDSSGYYSFDY

SEQ ID NO: 191 - protein, 6 aa, Artificial Sequence
  Synthetic
QSISSY

SEQ ID NO: 192 - protein, 3 aa, Artificial Sequence
  Synthetic
AAS

SEQ ID NO: 193 - protein, 9 aa, Artificial Sequence
  Synthetic
QQSYSTPLT

SEQ ID NO: 194 - protein, 5 aa, Artificial Sequence
  Synthetic
SYWIG

SEQ ID NO: 195 - protein, 18 aa, Artificial Sequence
  Synthetic
IIYPGDSDTRYSPSFQGQ

SEQ ID NO: 196 - protein, 13 aa, Artificial Sequence
  Synthetic
FPYDSSGYYSFDY

SEQ ID NO: 197 - protein, 11 aa, Artificial Sequence
  Synthetic
RASQSISSYLN

SEQ ID NO: 198 - protein, 7 aa, Artificial Sequence
  Synthetic
AASSLQS

SEQ ID NO: 199 - protein, 7 aa, Artificial Sequence
  Synthetic
GYSFTSY

SEQ ID NO: 200 - protein, 3 aa, Artificial Sequence
  Synthetic
GDS

SEQ ID NO: 201 - protein, 11 aa, Artificial Sequence
  Synthetic
PYDSSGYYSFD

SEQ ID NO: 202 - protein, 7 aa, Artificial Sequence
  Synthetic
SQSISSY

SEQ ID NO: 203 - protein, 6 aa, Artificial Sequence
  Synthetic
SYSTPL

SEQ ID NO: 204 - protein, 122 aa, Artificial Sequence
  Synthetic
QVQLVQSGAEVKKPGESLKISCKGSGYSFTSYWIGWVRQMPGKGLEWMGIIYPGDSDTRYSPSFQGQVTISADKSISTAYLQWSSLKASDTAMYYCARFPYDSSGYYSFDYWGQGTLVTVSS

SEQ ID NO: 205 - protein, 107 aa, Artificial Sequence [sequence omitted]

SEQ ID NO: 206 - protein, 243 aa, Artificial Sequence
  Synthetic
DIQMTQSPSSLSASVGDRVTITCRASQSISSYLNWYQQKPGKAPKLLIYAASSLQSGVPSRFSGSGSGTDFTLTISSLQPEDFATYYCQQSYSTPLTFGGGTKVEIKEGKSSGSGSESKASQVQLVQSGAEVKKPGESLKISCKGSGYSFTSYWIGWVRQMPGKGLEWMGIIYPGDSDTRYSPSFQGQVTISADKSISTAYLQWSSLKASDTAMYYCARFPYDSSGYYSFDYWGQGTLVTVSS

SEQ ID NO: 207 - protein, 231 aa, Artificial Sequence
  Synthetic
PKSCDKTHTCPPCPAPELLGGPSVFLFPPKPKDTLMISRTPEVTCVVVDVSHEDPEVKFNWYVDGVEVHNAKTKPREEQYNSTYRVVSVLTVLHQDWLNGKEYKCKVSNKALPAPIEKTISKAKGQPREPQVYTLPPSRDELTKNQVSLTCLVKGFYPSDIAVEWESNGQPENNYKTTPPVLDSDGSFFLYSKLTVDKSRWQQGNVFSCSVMHEALHNHYTQKSLSLSPGK

SEQ ID NO: 208 - protein, 481 aa, Artificial Sequence
  Synthetic
DIQMTQSPSSLSASVGDRVTITCRASQSISSYLNWYQQKPGKAPKLLIYAASSLQSGVPSRFSGSGSGTDFTLTISSLQPEDFATYYCQQSYSTPLTFGGGTKVEIKEGKSSGSGSESKASQVQLVQSGAEVKKPGESLKISCKGSGYSFTSYWIGWVRQMPGKGLEWMGIIYPGDSDTRYSPSFQGQVTISADKSISTAYLQWSSLKASDTAMYYCARFPYDSSGYYSFDYWGQGTLVTVSSDIEGRMDPKSCDKTHTCPPCPAPELLGGPSVFLFPPKPKDTLMISRTPEVTCVVVDVSHEDPEVKFNWYVDGVEVHNAKTKPREEQYNSTYRVVSVLTVLHQDWLNGKEYKCKVSNKALPAPIEKTISKAKGQPREPQVYTLPPSRDELTKNQVSLTCLVKGFYPSDIAVEWESNGQPENNYKTTPPVLDSDGSFFLYSKLTVDKSRWQQGNVFSCSVMHEALHNHYTQKSLSLSPGK

SEQ ID NO: 209 - protein, 481 aa, Artificial Sequence
  Synthetic
PKSCDKTHTCPPCPAPELLGGPSVFLFPPKPKDTLMISRTPEVTCVVVDVSHEDPEVKFNWYVDGVEVHNAKTKPREEQYNSTYRVVSVLTVLHQDWLNGKEYKCKVSNKALPAPIEKTISKAKGQPREPQVYTLPPSRDELTKNQVSLTCLVKGFYPSDIAVEWESNGQPENNYKTTPPVLDSDGSFFLYSKLTVDKSRWQQGNVFSCSVMHEALHNHYTQKSLSLSPGKDIEGRMDDIQMTQSPSSLSASVGDRVTITCRASQSISSYLNWYQQKPGKAPKLLIYAASSLQSGVPSRFSGSGSGTDFTLTISSLQPEDFATYYCQQSYSTPLTFGGGTKVEIKEGKSSGSGSESKASQVQLVQSGAEVKKPGESLKISCKGSGYSFTSYWIGWVRQMPGKGLEWMGIIYPGDSDTRYSPSFQGQVTISADKSISTAYLQWSSLKASDTAMYYCARFPYDSSGYYSFDYWGQGTLVTVSS

SEQ ID NO: 210 - protein, 453 aa, Artificial Sequence
  Synthetic
QVQLVQSGAEVKKPGESLKISCKGSGYSFTSYWIGWVRQMPGKGLEWMGIIYPGDSDTRYSPSFQGQVTISADKSISTAYLQWSSLKASDTAMYYCARFPYDSSGYYSFDYWGQGTLVTVSSASTKGPSVFPLAPSSKSTSGGTAALGCLVKDYFPEPVTVSWNSGALTSGVHTFPAVLQSSGLYSLSSVVTVPSSSLGTQTYICNVNHKPSNTKVDKKVEPKSCDKTHTCPPCPAPELLLGGPSVFLFPPKPKDTLMISRTPEVTCVVVDVSHEDPEVKFNWYVDGVEVHNAKTKPREEQYNSTYRVVSVLTVLHQDWLNGKEYKCKVSNKALPAPIEKTISKAKGQPREPQVYTLPPSRDELTKNQVSLTCLVKGFYPSDIAVEWESNGQPENNYKTTPPVLDSDGSFFLYSKLTVDKSRWQQGNVFSCSVMHEALHNHYTQKSLSLSPGK

SEQ ID NO: 211 - protein, 452 aa, Artificial Sequence
  Synthetic
QVQLVQSGAEVKKPGESLKISCKGSGYSFTSYWIGWVRQMPGKGLEWMGIIYPGDSDTRYSPSFQGQVTISADKSISTAYLQWSSLKASDTAMYYCARFPYDSSGYYSFDYWGQGTLVTVSSASTKGPSVFPLAPSSKSTSGGTAALGCLVKDYFPEPVTVSWNSGALTSGVHTFPAVLQSSGLYSLSSVVTVPSSSLGTQTYICNVNHKPSNTKVDKKVEPKSCDKTHTCPPCPAPEAAGGPSVFLFPPKPKDTLMISRTPEVTCVVVDVSHEDPEVKFNWYVDGVEVHNAKTKPREEQYNSTYRVVSVLTVLHQDWLNGKEYKCKVSNKALPAPIEKTISKAKGQPREPQVYTLPPSRDELTKNQVSLTCLVKGFYPSDIAVEWESNGQPENNYKTTPPVLDSDGSFFLYSKLTVDKSRWQQGNVFSCSVMHEALHNHYTQKSLSLSPGK

SEQ ID NO: 212 - protein, 214 aa, Artificial Sequence
  Synthetic
DIQMTQSPSSLSASVGDRVTITCRASQSISSYLNWYQQKPGKAPKLLIYAASSLQSGVPSRFSGSGSGTDFTLTISSLQPEDFATYYCQQSYSTPLTFGGGTKVEIKRTVAAPSVFIFPPSDEQLKSGTASVVCLLNNFYPREAKVQWKVDNALQSGNSQESVTEQDSKDSTYSLSSTLTLSKADYEKHKVYACEVTHQGLSSPVTKSFNRGEC

SEQ ID NO: 213 - protein, 232 aa, Artificial Sequence
  Synthetic
QVQLVQSGAEVKKPGESLKISCKGSGYSFTSYWIGWVRQMPGKGLEWMGIIYPGDSDTRYSPSFQGQVTISADKSISTAYLQWSSLKASDTAMYYCARFPYDSSGYYSFDYWGQGTLVTVSSASTKGPSVFPLAPSSKSTSGGTAALGCLVKDYFPEPVTVSWNSGALTSGVHTFPAVLQSSGLYSLSSVVTVPSSSLGTQTYICNVNHKPSNTKVDKKVEPKSCDKTHTCP

SEQ ID NO: 214 - protein, 19 aa, Artificial Sequence
  Synthetic
MGWSCIILFLVATATGVHS

SEQ ID NO: 215 - protein, 14 aa, Artificial Sequence
  Synthetic
EGKSSGSGSESKAS

SEQ ID NO: 216 - protein, 5 aa, Artificial Sequence
  Synthetic
SYWMH

SEQ ID NO: 217 - protein, 17 aa, Artificial Sequence
  Synthetic
EINPTNGRTNYIEKFKS

SEQ ID NO: 218 - protein, 7 aa, Artificial Sequence
  Synthetic
GTRAYHY

SEQ ID NO: 219 - protein, 11 aa, Artificial Sequence
  Synthetic
RASDNLYSNLA

SEQ ID NO: 220 - protein, 7 aa, Artificial Sequence
  Synthetic
DATNLAD

SEQ ID NO: 221 - protein, 9 aa, Artificial Sequence
  Synthetic
QHFWGTPLT

SEQ ID NO: 222 - protein, 7 aa, Artificial Sequence
  Synthetic
GYTFTSY

SEQ ID NO: 223 - protein, 6 aa, Artificial Sequence
  Synthetic
NPTNGR

SEQ ID NO: 224 - protein, 6 aa, Artificial Sequence
  Synthetic
TSYWMH

SEQ ID NO: 225 - protein, 13 aa, Artificial Sequence
  Synthetic
WIGEINPTNGRTN

SEQ ID NO: 226 - protein, 6 aa, Artificial Sequence
  Synthetic
ARGTRA

SEQ ID NO: 227 - protein, 7 aa, Artificial Sequence
  Synthetic
YSNLAWY

SEQ ID NO: 228 - protein, 10 aa, Artificial Sequence
  Synthetic
LLVYDATNLA

SEQ ID NO: 229 - protein, 8 aa, Artificial Sequence
  Synthetic
QHFWGTPL

SEQ ID NO: 230 - protein, 116 aa, Artificial Sequence
  Synthetic
QVQLQQPGAELVKPGASVKLSCKASGYTFTSYWMHWVKQRPGQGLEWIGEINPTNGRTNYIEKFKSKATLTVDKSSSTAYMQLSSLTSEDSAVYYCARGTRAYHYWGQGTSVTVSS

SEQ ID NO: 231 - protein, 107 aa, Artificial Sequence
  Synthetic
DIQMTQSPASLSVSVGETVTITCRASDNLYSNLAWYQQKQGKSPQLLVYDATNLADGVPSRFSGSGSGTQYSLKINSLQSEDFGTYYCQHFWGTPLTFGAGTKLELK

SEQ ID NO: 232 - protein, 9 aa, Artificial Sequence
  Synthetic
QHFAGTPLT

SEQ ID NO: 233 - protein, 8 aa, Artificial Sequence
  Synthetic
QHFAGTPL

SEQ ID NO: 234 - protein, 116 aa, Artificial Sequence
  Synthetic
EVQLVQSGAEVKKPGASVKVSCKASGYTFTSYWMHWVRQAPGQRLEWIGEINPTNGRTNYIEKFKSRATLTVDKSASTAYMELSSLRSEDTAVYYCARGTRAYHYWGQGTMVTVSS

SEQ ID NO: 235 - protein, 107 aa, Artificial Sequence
  Synthetic
DIQMTQSPSSLSASVGDRVTITCRASDNLYSNLAWYQQKPGKSPKLLVYDATNLADGVPSRFSGSGSGTDYTLTISSLQPEDFATYYCQHFWGTPLTFGQGTKVEIK

SEQ ID NO: 236 - protein, 446 aa, Artificial Sequence
  Synthetic
QVQLQQPGAELVKPGASVKLSCKASGYTFTSYWMHWVKQRPGQGLEWIGEINPTNGRTNYIEKFKSKATLTVDKSSSTAYMQLSSLTSEDSAVYYCARGTRAYHYWGQGTSVTVSSASTKGPSVFPLAPSSKSTSGGTAALGCLVKDYFPEPVTVSWNSGALTSGVHTFPAVLQSSGLYSLSSVVTVPSSSLGTQTYICNVNHKPSNTKVDKKVEPKSCDKTHTCPPCPAPELLGGPSVFLFPPKPKDTLMISRTPEVTCVVVDVSHEDPEVKFNWYVDGVEVHNAKTKPREEQYNSTYRVVSVLTVLHQDWLNGKEYKCKVSNKALPAPIEKTISKAKGQPREPQVYTLPPSRDELTKNQVSLTCLVKGFYPSDIAVEWESNGQPENNYKTTPPVLDSDGSFFLYSKLTVDKSRWQQGNVFSCSVMHEALHNHYTQKSLSLSPGK

SEQ ID NO: 237 - protein, 214 aa, Artificial Sequence
  Synthetic
DIQMTQSPASLSVSVGETVTITCRASDNLYSNLAWYQQKQGKSPQLLVYDATNLADGVPSRFSGSGSGTQYSLKINSLQSEDFGTYYCQHFWGTPLTFGAGTKLELKRTVAAPSVFIFPPSDEQLKSGTASVVCLLNNFYPREAKVQWKVDNALQSGNSQESVTEQDSKDSTYSLSSTLTLSKADYEKHKVYACEVTHQGLSSPVTKSFNRGEC

SEQ ID NO: 238 - protein, 446 aa, Artificial Sequence
  Synthetic
EVQLVQSGAEVKKPGASVKVSCKASGYTFTSYWMHWVRQAPGQRLEWIGEINPTNGRTNYIEKFKSRATLTVDKSASTAYMELSSLRSEDTAVYYCARGTRAYHYWGQGTMVTVSSASTKGPSVFPLAPSSKSTSGGTAALGCLVKDYFPEPVTVSWNSGALTSGVHTFPAVLQSSGLYSLSSVVTVPSSSLGTQTYICNVNHKPSNTKVDKKVEPKSCDKTHTCPPCPAPELLGGPSVFLFPPKPKDTLMISRTPEVTCVVVDVSHEDPEVKFNWYVDGVEVHNAKTKPREEQYNSTYRVVSVLTVLHQDWLNGKEYKCKVSNKALPAPIEKTISKAKGQPREPQVYTLPPSRDELTKNQVSLTCLVKGFYPSDIAVEWESNGQPENNYKTTPPVLDSDGSFFLYSKLTVDKSRWQQGNVFSCSVMHEALHNHYTQKSLSLSPGK

SEQ ID NO: 239 - protein, 214 aa, Artificial Sequence
  Synthetic
DIQMTQSPSSLSASVGDRVTITCRASDNLYSNLAWYQQKPGKSPKLLVYDATNLADGVPSRFSGSGSGTDYTLTISSLQPEDFATYYCQHFWGTPLTFGQGTKVEIKRTVAAPSVFIFPPSDEQLKSGTASVVCLLNNFYPREAKVQWKVDNALQSGNSQESVTEQDSKDSTYSLSSTLTLSKADYEKHKVYACEVTHQGLSSPVTKSFNRGEC

SEQ ID NO: 240 - protein, 226 aa, Artificial Sequence
  Synthetic
QVQLQQPGAELVKPGASVKLSCKASGYTFTSYWMHWVKQRPGQGLEWIGEINPTNGRTNYIEKFKSKATLTVDKSSSTAYMQLSSLTSEDSAVYYCARGTRAYHYWGQGTSVTVSSASTKGPSVFPLAPSSKSTSGGTAALGCLVKDYFPEPVTVSWNSGALTSGVHTFPAVLQSSGLYSLSSVVTVPSSSLGTQTYICNVNHKPSNTKVDKKVEPKSCDKTHTCP

SEQ ID NO: 241 - protein, 226 aa, Artificial Sequence
  Synthetic
EVQLVQSGAEVKKPGASVKVSCKASGYTFTSYWMHWVRQAPGQRLEWIGEINPTNGRTNYIEKFKSRATLTVDKSASTAYMELSSLRSEDTAVYYCARGTRAYHYWGQGTMVTVSSASTKGPSVFPLAPSSKSTSGGTAALGCLVKDYFPEPVTVSWNSGALTSGVHTFPAVLQSSGLYSLSSVVTVPSSSLGTQTYICNVNHKPSNTKVDKKVEPKSCDKTHTCP

SEQ ID NO: 242 - protein, 760 aa, Homo sapiens
MMDQARSAFSNLFGGEPLSYTRFSLARQVDGDNSHVEMKLAVDEEENADNNTKANVTKPKRCSGSICYGTIAVIVFFLIGFMIGYLGYCKGVEPKTECERLAGTESPVREEPGEDFPAARRLYWDDLKRKLSEKLDSTDFTGTIKLLNENSYVPREAGSQKDENLALYVENQFREFKLSKVWRDQHFVKIQVKDSAQNSVIIVDKNGRLVYLVENPGGYVAYSKAATVTGKLVHANFGTKKDFEDLYTPVNGSIVIVRAGKITFAEKVANAESLNAIGVLIYMDQTKFPIVNAELSFFGHAHLGTGDPYTPGFPSFNHTQFPPSRSSGLPNIPVQTISRAAAEKLFGNMEGDCPSDWKTDSTCRMVTSESKNVKLTVSNVLKEIKILNIFGVIKGFVEPDHYVVVGAQRDAWGPGAAKSGVGTALLLKLAQMFSDMVLKDGFQPSRSIIFASWSAGDFGSVGATEWLEGYLSSLHLKAFTYINLDKAVLGTSNFKVSASPLLYTLIEKTMQNVKHPVTGQFLYQDSNWASKVEKLTLDNAAFPFLAYSGIPAVSFCFCEDTDYPYLGTTMDTYKELIERIPELNKVARAAAEVAGQFVIKLTHDVELNLDYERYNSQLLSFVRDLNQYRADIKEMGLSLQWLYSARGDFFRATSRLTTDFGNAEKTDRFVMKKLNDRVMRVEYHFLSPYVSPKESPFRHVFWGSGSHTLPALLENLKLRKQNNGAFNETLFRNQLALATWTIQGAANALSGDVWDIDNEF

SEQ ID NO: 243 - protein, 760 aa, Macaca mulatta
MMDQARSAFSNLFGGEPLSYTRFSLARQVDGDNSHVEMKLGVDEEENTDNNTKPNGTKPKRCGGNICYGTIAVIIFFLIGFMIGYLGYCKGVEPKTECERLAGTESPAREEPEEDFPAAPRLYWDDLKRKLSEKLDTTDFTSTIKLLNENLYVPREAGSQKDENLALYIENQFREFKLSKVWRDQHFVKIQVKDSAQNSVIIVDKNGGLVYLVENPGGYVAYSKAATVTGKLVHANFGTKKDFEDLDSPVNGSIVIVRAGKITFAEKVANAESLNAIGVLIYMDQTKFPIVKADLSFFGHAHLGTGDPYTPGFPSFNHTQFPPSQSSGLPNIPVQTISRAAAEKLFGNMEGDCPSDWKTDSTCKMVTSENKSVKLTVSNVLKETKILNIFGVIKGFVEPDHYVVVGAQRDAWGPGAAKSSVGTALLLKLAQMFSDMVLKDGFQPSRSIIFASWSAGDFGSVGATEWLEGYLSSLHLKAFTYINLDKAVLGTSNFKVSASPLLYTLIEKTMQDVKHPVTGRSLYQDSNWASKVEKLTLDNAAFPFLAYSGIPAVSFCFCEDTDYPYLGTTMDTYKELVERIPELNKVARAAAEVAGQFVIKLTHDTELNLDYERYNSQLLLFLRDLNQYRADVKEMGLSLQWLYSARGDFFRATSRLTTDFRNAEKRDKFVMKKLNDRVMRVEYYFLSPYVSPKESPFRHVFWGSGSHTLSALLESLKLRRQNNSAFNETLFRNQLALATWTIQGAANALSGDVWDIDNEF

SEQ ID NO: 244 - protein, 760 aa, Macaca fascicularis
MMDQARSAFSNLFGGEPLSYTRFSLARQVDGDNSHVEMKLGVDEEENTDNNTKANGTKPKRCGGNICYGTIAVIIFFLIGFMIGYLGYCKGVEPKTECERLAGTESPAREEPEEDFPAAPRLYWDDLKRKLSEKLDTTDFTSTIKLLNENLYVPREAGSQKDENLALYIENQFREFKLSKVWRDQHFVKIQVKDSAQNSVIIVDKNGGLVYLVENPGGYVAYSKAATVTGKLVHANFGTKKDFEDLDSPVNGSIVIVRAGKITFAEKVANAESLNAIGVLIYMDQTKFPIVKADLSFFGHAHLGTGDPYTPGFPSFNHTQFPPSQSSGLPNIPVQTISRAAAEKLFGNMEGDCPSDWKTDSTCKMVTSENKSVKLTVSNVLKETKILNIFGVIKGFVEPDHYVVVGAQRDAWGPGAAKSSVGTALLLKLAQMFSDMVLKDGFQPSRSIIFASWSAGDFGSVGATEWLEGYLSSLHLKAFTYINLDKAVLGTSNFKVSASPLLYTLIEKTMQDVKHPVTGRSLYQDSNWASKVEKLTLDNAAFPFLAYSGIPAVSFCFCEDTDYPYLGTTMDTYKELVERIPELNKVARAAAEVAGQFVIKLTHDTELNLDYERYNSQLLLFLRDLNQYRADVKEMGLSLQWLYSARGDFFRATSRLTTDFRNAEKRDKFVMKKLNDRVMRVEYYFLSPYVSPKESPFRHVFWGSGSHTLSALLESLKLRRQNNSAFNETLFRNQLALATWTIQGAANALSGDVWDIDNEF

SEQ ID NO: 245 - protein, 763 aa, Mus musculus
MMDQARSAFSNLFGGEPLSYTRFSLARQVDGDNSHVEMKLAADEEENADNNMKASVRKPKRFNGRLCFAAIALVIFFLIGFMSGYLGYCKRVEQKEECVKLAETEETDKSETMETEDVPTSSRLYWADLKTLLSEKLNSIEFADTIKQLSQNTYTPREAGSQKDESLAYYIENQFHEFKFSKVWRDEHYVKIQVKSSIGQNMVTIVQSNGNLDPVESPEGYVAFSKPTEVSGKLVHANFGTKKDFEELSYSVNGSLVIVRAGEITFAEKVANAQSFNAIGVLIYMDKNKFPVVEADLALFGHAHLGTGDPYTPGFPSFNHTQFPPSQSSGLPNIPVQTISRAAAEKLFGKMEGSCPARWNIDSSCKLELSQNQNVKLIVKNVLKERRILNIFGVIKGYEEPDRYVVVGAQRDALGAGVAAKSSVGTGLLLKLAQVFSDMISKDGFRPSRSIIFASWTAGDFGAVGATEWLEGYLSSLHLKAFTYINLDKVVLGTSNFKVSASPLLYTLMGKIMQDVKHPVDGKSLYRDSNWISKVEKLSFDNAAYPFLAYSGIPAVSFCFCEDADYPYLGTRLDTYEALTQKVPQLNQMVRTAAEVAGQLIIKLTHDVELNLDYEMYNSKLLSFMKDLNQFKTDIRDMGLSLQWLYSARGDYFRATSRLTTDFHNAEKTNRFVMREINDRIMKVEYHFLSPYVSPRESPFRHIFWGSGSHTLSALVENLKLRQKNITAFNETLFRNQLALATWTIQGVANALSGDIWNIDNEF

SEQ ID NO: 246 - RNA, 20 nt, Artificial Sequence
  Synthetic
ggacggcccggcuugcugcc

SEQ ID NO: 247 - RNA, 20 nt, Artificial Sequence
  Synthetic
gggcccggaucacaggacug

SEQ ID NO: 248 - RNA, 20 nt, Artificial Sequence
  Synthetic
caaacuugcucagcaguguc

SEQ ID NO: 249 - RNA, 20 nt, Artificial Sequence
  Synthetic
aaacuugcucagcaguguca

SEQ ID NO: 250 - RNA, 20 nt, Artificial Sequence
  Synthetic
cggauggccuccaucucccg

SEQ ID NO: 251 - RNA, 20 nt, Artificial Sequence
  Synthetic
cucggccggaauccgcuccc

SEQ ID NO: 252 - RNA, 20 nt, Artificial Sequence
  Synthetic
ucucggccggaauccgcucc

SEQ ID NO: 253 - RNA, 20 nt, Artificial Sequence
  Synthetic
ugcucagcagugucagcagg

SEQ ID NO: 254 - RNA, 20 nt, Artificial Sequence
  Synthetic
uugucggguuugaugucccu

SEQ ID NO: 255 - RNA, 19 nt, Artificial Sequence
  Synthetic
guugcggguuugauguccc

SEQ ID NO: 256 - RNA, 20 nt, Artificial Sequence
  Synthetic
uccgccagguagaagcgcgc

SEQ ID NO: 257 - RNA, 20 nt, Artificial Sequence
  Synthetic
cauggcauacaccuggcccg

SEQ ID NO: 258 - RNA, 20 nt, Artificial Sequence
  Synthetic
aacuugcucagcagugucag

SEQ ID NO: 259 - RNA, 20 nt, Artificial Sequence
  Synthetic
cagcugcgugauccaccgcc

SEQ ID NO: 260 - RNA, 20 nt, Artificial Sequence
  Synthetic
cgaauguccgacagugucuc

SEQ ID NO: 261 - RNA, 20 nt, Artificial Sequence
  Synthetic
gaagucggccaggcggaugu

SEQ ID NO: 262 - RNA, 20 nt, Artificial Sequence
  Synthetic
ugucggguuugaugucccug

SEQ ID NO: 263 - RNA, 20 nt, Artificial Sequence
  Synthetic
ggauggccuccaucucccgg

SEQ ID NO: 264 - RNA, 20 nt, Artificial Sequence
  Synthetic
aggauguugucggguuugau

SEQ ID NO: 265 - RNA, 20 nt, Artificial Sequence
  Synthetic
gucggguuugaugucccugu

SEQ ID NO: 266 - RNA, 20 nt, Artificial Sequence
  Synthetic
aauacuccaugaccagguac

SEQ ID NO: 267 - RNA, 20 nt, Artificial Sequence
  Synthetic
cuuguucaugaucuucaugg

SEQ ID NO: 268 - RNA, 20 nt, Artificial Sequence
  Synthetic
ucagugcauccaaaacgugg

SEQ ID NO: 269 - RNA, 20 nt, Artificial Sequence
  Synthetic
cugucccggagaccauccca

SEQ ID NO: 270 - RNA, 20 nt, Artificial Sequence
  Synthetic
gggccugggaccucacuguc

SEQ ID NO: 271 - RNA, 20 nt, Artificial Sequence
  Synthetic
cccacguaauacuccaugac

SEQ ID NO: 272 - RNA, 20 nt, Artificial Sequence
  Synthetic
cucugccgcagggacagccg

SEQ ID NO: 273 - RNA, 20 nt, Artificial Sequence
  Synthetic
cugugcacguagccaagccg

SEQ ID NO: 274 - RNA, 20 nt, Artificial Sequence
  Synthetic
ugcccauccacgucagggcc

SEQ ID NO: 275 - RNA, 20 nt, Artificial Sequence
  Synthetic
agcgccuccgauaggccagg

SEQ ID NO: 276 - RNA, 20 nt, Artificial Sequence
  Synthetic
ugugcacguagccaagccgg

SEQ ID NO: 277 - RNA, 20 nt, Artificial Sequence
  Synthetic
gaccagguacagguaguucu

SEQ ID NO: 278 - RNA, 20 nt, Artificial Sequence
  Synthetic
ccaucucggccggaauccgc

SEQ ID NO: 279 - RNA, 20 nt, Artificial Sequence
  Synthetic
caucucggccggaauccgcu

SEQ ID NO: 280 - RNA, 20 nt, Artificial Sequence
  Synthetic
uugccauaggucuccgccgu

SEQ ID NO: 281 - RNA, 20 nt, Artificial Sequence
  Synthetic
acagcgguccagcaggaugu

SEQ ID NO: 282 - RNA, 20 nt, Artificial Sequence
  Synthetic
aaagcgccuccgauaggcca

SEQ ID NO: 283 - RNA, 20 nt, Artificial Sequence
  Synthetic
gccaaagaagaagggaugug

SEQ ID NO: 284 - RNA, 20 nt, Artificial Sequence
  Synthetic
cacguaauacuccaugacca

SEQ ID NO: 285 - RNA, 20 nt, Artificial Sequence
  Synthetic
aucucggccggaauccgcuc

SEQ ID NO: 286 - RNA, 20 nt, Artificial Sequence
  Synthetic
gcuucaucuucacuaccgcu

SEQ ID NO: 287 - RNA, 20 nt, Artificial Sequence
  Synthetic
gccaucucggccggaauccg

SEQ ID NO: 288 - RNA, 20 nt, Artificial Sequence
  Synthetic
cagggacagccgcuggaacu

SEQ ID NO: 289 - RNA, 20 nt, Artificial Sequence
  Synthetic
augacaaucuccgccaggua

SEQ ID NO: 290 - RNA, 20 nt, Artificial Sequence
  Synthetic
ggccaugacaaucuccgcca

SEQ ID NO: 291 - RNA, 20 nt, Artificial Sequence
  Synthetic
auacuccaugaccagguaca

SEQ ID NO: 292 - RNA, 20 nt, Artificial Sequence
  Synthetic
gccucugccucgcguaguug

SEQ ID NO: 293 - RNA, 20 nt, Artificial Sequence
  Synthetic
gaauguccgacagugucucc

SEQ ID NO: 294 - RNA, 20 nt, Artificial Sequence
  Synthetic
cguuccaucugcccgcagcu

SEQ ID NO: 295 - RNA, 20 nt, Artificial Sequence
  Synthetic
ccuuguaguggacgaucuug

SEQ ID NO: 296 - RNA, 20 nt, Artificial Sequence
  Synthetic
aucuccgccagguagaagcg

SEQ ID NO: 297 - RNA, 20 nt, Artificial Sequence
  Synthetic
cucaggcucugccgggugag

SEQ ID NO: 298 - RNA, 20 nt, Artificial Sequence
  Synthetic
ugcuucaucuucacuaccgc

SEQ ID NO: 299 - RNA, 20 nt, Artificial Sequence
  Synthetic
gcaggauguugucggguuug

SEQ ID NO: 300 - RNA, 20 nt, Artificial Sequence
  Synthetic
ggccucagccucugccgcag

SEQ ID NO: 301 - RNA, 20 nt, Artificial Sequence
  Synthetic
uguugucggguuugaugucc

SEQ ID NO: 302 - RNA, 20 nt, Artificial Sequence
  Synthetic
ccacguaauacuccaugacc

SEQ ID NO: 303 - RNA, 20 nt, Artificial Sequence
  Synthetic
ccguuccaucugcccgcagc

SEQ ID NO: 304 - RNA, 20 nt, Artificial Sequence
  Synthetic
uucccgaguaagcaggcaga

SEQ ID NO: 305 - RNA, 20 nt, Artificial Sequence
  Synthetic
ugaucuucauggcauacacc

SEQ ID NO: 306 - DNA, 20 bp, Artificial Sequence
  Synthetic
agggacagccgcuggaactg

SEQ ID NO: 307 - RNA, 20 nt, Artificial Sequence
  Synthetic
ggguuugaugucccugugca

SEQ ID NO: 308 - RNA, 20 nt, Artificial Sequence
  Synthetic
ugacaaucuccgccagguag

SEQ ID NO: 309 - RNA, 20 nt, Artificial Sequence
  Synthetic
cacagcgguccagcaggaug

SEQ ID NO: 310 - RNA, 20 nt, Artificial Sequence
  Synthetic
gcguagaagggcgucugccc

SEQ ID NO: 311 - RNA, 20 nt, Artificial Sequence
  Synthetic
cucagccucugccgcaggga

SEQ ID NO: 312 - RNA, 20 nt, Artificial Sequence
  Synthetic
gucucagugcauccaaaacg

SEQ ID NO: 313 - RNA, 20 nt, Artificial Sequence
  Synthetic
ggacgaucuugccauagguc

SEQ ID NO: 314 - RNA, 20 nt, Artificial Sequence
  Synthetic
ucagcagugucagcaggucc

SEQ ID NO: 315 - RNA, 20 nt, Artificial Sequence
  Synthetic
gcuccugggcggcgccagac

SEQ ID NO: 316 - RNA, 20 nt, Artificial Sequence
  Synthetic
agcaggauguugucggguuu

SEQ ID NO: 317 - RNA, 20 nt, Artificial Sequence
  Synthetic
auccgcuccugcaacugccg

SEQ ID NO: 318 - RNA, 20 nt, Artificial Sequence
  Synthetic
aggagcagggaaagcgccuc

SEQ ID NO: 319 - RNA, 20 nt, Artificial Sequence
  Synthetic
acaccuggcccgucugcuuc

SEQ ID NO: 320 - RNA, 20 nt, Artificial Sequence
  Synthetic
cccagcgcccaccagucaca

SEQ ID NO: 321 - RNA, 20 nt, Artificial Sequence
  Synthetic
gcucccucugccugcagcaa

SEQ ID NO: 322 - RNA, 20 nt, Artificial Sequence
  Synthetic
gcucaggcucugccggguga

SEQ ID NO: 323 - RNA, 20 nt, Artificial Sequence
  Synthetic
uugaugucccugugcacgua

SEQ ID NO: 324 - RNA, 20 nt, Artificial Sequence
  Synthetic
gccucagccucugccgcagg

SEQ ID NO: 325 - RNA, 20 nt, Artificial Sequence
  Synthetic
gguaguucucauccuggaag

SEQ ID NO: 326 - RNA, 20 nt, Artificial Sequence
  Synthetic
cagcgcccaccagucacacu

SEQ ID NO: 327 - RNA, 20 nt, Artificial Sequence
  Synthetic
cccaaacuugcucagcagug

SEQ ID NO: 328 - RNA, 20 nt, Artificial Sequence
  Synthetic
cuugccauaggucuccgccg

SEQ ID NO: 329 - RNA, 20 nt, Artificial Sequence
  Synthetic
uacaccuggcccgucugcuu

SEQ ID NO: 330 - RNA, 20 nt, Artificial Sequence
  Synthetic
ccagcgcccaccagucacac

SEQ ID NO: 331 - RNA, 20 nt, Artificial Sequence
  Synthetic
ggccucagccuggccgaaag

SEQ ID NO: 332 - RNA, 20 nt, Artificial Sequence
  Synthetic
aaucuccgccagguagaagc

SEQ ID NO: 333 - RNA, 20 nt, Artificial Sequence
  Synthetic
auggcauacaccuggcccgu

SEQ ID NO: 334 - RNA, 20 nt, Artificial Sequence
  Synthetic
ccaugacaaucuccgccagg

SEQ ID NO: 335 - RNA, 20 nt, Artificial Sequence
  Synthetic
uccccaaacuugcucagcag

SEQ ID NO: 336 - RNA, 20 nt, Artificial Sequence
  Synthetic
gauguugucggguuugaugu

SEQ ID NO: 337 - RNA, 20 nt, Artificial Sequence
  Synthetic
guuugcccauccacgucagg

SEQ ID NO: 338 - RNA, 20 nt, Artificial Sequence
  Synthetic
cggacggcccggcuugcugc

SEQ ID NO: 339 - RNA, 20 nt, Artificial Sequence
  Synthetic
cuccgccagguagaagcgcg

SEQ ID NO: 340 - RNA, 20 nt, Artificial Sequence
  Synthetic
guacagguaguucucauccu

SEQ ID NO: 341 - RNA, 20 nt, Artificial Sequence
  Synthetic
agggcgucugcccauagaac

SEQ ID NO: 342 - RNA, 20 nt, Artificial Sequence
  Synthetic
uggccacagcgguccagcag

SEQ ID NO: 343 - RNA, 20 nt, Artificial Sequence
  Synthetic
cguaguugacuggcgaaguu

SEQ ID NO: 344 - RNA, 20 nt, Artificial Sequence
  Synthetic
ucugccgcagggacagccgc

SEQ ID NO: 345 - RNA, 20 nt, Artificial Sequence
  Synthetic
aagcgccuccgauaggccag

SEQ ID NO: 346 - RNA, 20 nt, Artificial Sequence
  Synthetic
gacagaacaacggcgaacag

SEQ ID NO: 347 - RNA, 20 nt, Artificial Sequence
  Synthetic
gcucagcagugucagcaggu

SEQ ID NO: 348 - RNA, 20 nt, Artificial Sequence
  Synthetic
augaucuucauggcauacac

SEQ ID NO: 349 - RNA, 20 nt, Artificial Sequence
  Synthetic
uuugcccauccacgucaggg

SEQ ID NO: 350 - RNA, 20 nt, Artificial Sequence
  Synthetic
acuugcucagcagugucagc

SEQ ID NO: 351 - RNA, 20 nt, Artificial Sequence
  Synthetic
ugaugucccugugcacguag

SEQ ID NO: 352 - RNA, 20 nt, Artificial Sequence
  Synthetic
aaauaccgaggaaugucggg

SEQ ID NO: 353 - RNA, 20 nt, Artificial Sequence
  Synthetic
ggcgaauacacccagcgccc

SEQ ID NO: 354 - RNA, 20 nt, Artificial Sequence
  Synthetic
agacaauaaauaccgaggaa

SEQ ID NO: 355 - RNA, 20 nt, Artificial Sequence
  Synthetic
cccgucugcuucaucuucac

SEQ ID NO: 356 - RNA, 20 nt, Artificial Sequence
  Synthetic
cugccugcagcaacuccauc

SEQ ID NO: 357 - RNA, 20 nt, Artificial Sequence
  Synthetic
ccucagccucugccgcaggg

SEQ ID NO: 358 - RNA, 20 nt, Artificial Sequence
  Synthetic
guguccggaagucgccugcu

SEQ ID NO: 359 - RNA, 20 nt, Artificial Sequence
  Synthetic
ugcacguguggcucaagcag

SEQ ID NO: 360 - RNA, 20 nt, Artificial Sequence
  Synthetic
gacaauaaauaccgaggaau

SEQ ID NO: 361 - RNA, 20 nt, Artificial Sequence
  Synthetic
gccaugacaaucuccgccag

SEQ ID NO: 362 - RNA, 20 nt, Artificial Sequence
  Synthetic
gcugucccggagaccauccc

SEQ ID NO: 363 - RNA, 20 nt, Artificial Sequence
  Synthetic
caugaccagguacagguagu

SEQ ID NO: 364 - RNA, 20 nt, Artificial Sequence
  Synthetic
agcgcccaccagucacacuc

SEQ ID NO: 365 - RNA, 20 nt, Artificial Sequence
  Synthetic
ucucagugcauccaaaacgu

SEQ ID NO: 366 - RNA, 20 nt, Artificial Sequence
  Synthetic
uuugggcagauggagggccu

SEQ ID NO: 367 - RNA, 20 nt, Artificial Sequence
  Synthetic
gaugucccugugcacguagc

SEQ ID NO: 368 - RNA, 20 nt, Artificial Sequence
  Synthetic
cagcagugucagcagguccc

SEQ ID NO: 369 - RNA, 20 nt, Artificial Sequence
  Synthetic
caugacaaucuccgccaggu

SEQ ID NO: 370 - RNA, 20 nt, Artificial Sequence
  Synthetic
acuuguucaugaucuucaug

SEQ ID NO: 371 - RNA, 20 nt, Artificial Sequence
  Synthetic
guggaauccgcguagaaggg

SEQ ID NO: 372 - RNA, 20 nt, Artificial Sequence
  Synthetic
uggccaugacaaucuccgcc

SEQ ID NO: 373 - RNA, 20 nt, Artificial Sequence
  Synthetic
gggacagacaauaaauaccg

SEQ ID NO: 374 - RNA, 20 nt, Artificial Sequence
  Synthetic
ccgcuccccaaacuugcuca

SEQ ID NO: 375 - RNA, 20 nt, Artificial Sequence
  Synthetic
cggcucaggcucugccgggu

SEQ ID NO: 376 - RNA, 20 nt, Artificial Sequence
  Synthetic
ggcuccugggcggcgccaga

SEQ ID NO: 377 - RNA, 20 nt, Artificial Sequence
  Synthetic
uuucccgaguaagcaggcag

SEQ ID NO: 378 - RNA, 20 nt, Artificial Sequence
  Synthetic
ggauguugucggguuugaug

SEQ ID NO: 379 - RNA, 20 nt, Artificial Sequence
  Synthetic
cagguaguucucauccugga

SEQ ID NO: 380 - RNA, 20 nt, Artificial Sequence
  Synthetic
ugcccauagaacauuucaua

SEQ ID NO: 381 - RNA, 20 nt, Artificial Sequence
  Synthetic
uaguucucauccuggaaggc

SEQ ID NO: 382 - RNA, 20 nt, Artificial Sequence
  Synthetic
augucccugugcacguagcc

SEQ ID NO: 383 - RNA, 20 nt, Artificial Sequence
  Synthetic
cgggcccggaucacaggacu

SEQ ID NO: 384 - RNA, 20 nt, Artificial Sequence
  Synthetic
uggacgaucuugccauaggu

SEQ ID NO: 385 - RNA, 20 nt, Artificial Sequence
  Synthetic
guuggccggcgugggccacc

SEQ ID NO: 386 - RNA, 20 nt, Artificial Sequence
  Synthetic
cucagugcauccaaaacgug

SEQ ID NO: 387 - RNA, 20 nt, Artificial Sequence
  Synthetic
ucgaaguugcaugugucggu

SEQ ID NO: 388 - RNA, 20 nt, Artificial Sequence
  Synthetic
uggaacacggacggcccggc

SEQ ID NO: 389 - RNA, 20 nt, Artificial Sequence
  Synthetic
ccgagagcagcgcaagugag

SEQ ID NO: 390 - RNA, 20 nt, Artificial Sequence
  Synthetic
uccugcaacugccggacgug

SEQ ID NO: 391 - RNA, 20 nt, Artificial Sequence
  Synthetic
ucaccaacacgucccucucc

SEQ ID NO: 392 - RNA, 20 nt, Artificial Sequence
  Synthetic
ugccugcagcaacuccaucc

SEQ ID NO: 393 - RNA, 20 nt, Artificial Sequence
  Synthetic
uuggccggcgugggccacca

SEQ ID NO: 394 - RNA, 20 nt, Artificial Sequence
  Synthetic
gagccucugccucgcguagu

SEQ ID NO: 395 - RNA, 20 nt, Artificial Sequence
  Synthetic
aagggcgucugcccauagaa

SEQ ID NO: 396 - RNA, 20 nt, Artificial Sequence
  Synthetic
acagacaauaaauaccgagg

SEQ ID NO: 397 - RNA, 20 nt, Artificial Sequence
  Synthetic
ggacagacaauaaauaccga

SEQ ID NO: 398 - RNA, 20 nt, Artificial Sequence
  Synthetic
acgugugccucuaggucccg

SEQ ID NO: 399 - RNA, 20 nt, Artificial Sequence
  Synthetic
ggcacgagacagaacaacgg

SEQ ID NO: 400 - RNA, 20 nt, Artificial Sequence
  Synthetic
ugaccagguacagguaguuc

SEQ ID NO: 401 - RNA, 20 nt, Artificial Sequence
  Synthetic
cucugccgggugagcaccuc

SEQ ID NO: 402 - RNA, 20 nt, Artificial Sequence
  Synthetic
gacaaucuccgccagguaga

SEQ ID NO: 403 - RNA, 20 nt, Artificial Sequence
  Synthetic
ucuccgccagguagaagcgc

SEQ ID NO: 404 - RNA, 20 nt, Artificial Sequence
  Synthetic
cucugccucgcguaguugac

SEQ ID NO: 405 - RNA, 20 nt, Artificial Sequence
  Synthetic
cuuugggcagauggagggcc

SEQ ID NO: 406 - RNA, 20 nt, Artificial Sequence
  Synthetic
acagguaguucucauccugg

SEQ ID NO: 407 - DNA, 20 bp, Artificial Sequence
  Synthetic
ccaaacuugctcagcagugu

SEQ ID NO: 408 - RNA, 20 nt, Artificial Sequence
  Synthetic
ucggguuugaugucccugug

SEQ ID NO: 409 - RNA, 20 nt, Artificial Sequence
  Synthetic
ggcuugcugccuucccaggc

SEQ ID NO: 410 - RNA, 20 nt, Artificial Sequence
  Synthetic
uacagguaguucucauccug

SEQ ID NO: 411 - RNA, 20 nt, Artificial Sequence
  Synthetic
uugcccauccacgucagggc

SEQ ID NO: 412 - RNA, 20 nt, Artificial Sequence
  Synthetic
agguacagguaguucucauc

SEQ ID NO: 413 - RNA, 20 nt, Artificial Sequence
  Synthetic
gacagacaauaaauaccgag

SEQ ID NO: 414 - RNA, 20 nt, Artificial Sequence
  Synthetic
uagaacauuucauaggcgaa

SEQ ID NO: 415 - RNA, 20 nt, Artificial Sequence
  Synthetic
agggccuuuuauucgcgagg

SEQ ID NO: 416 - RNA, 20 nt, Artificial Sequence
  Synthetic
gccucgcguaguugacuggc

SEQ ID NO: 417 - RNA, 20 nt, Artificial Sequence
  Synthetic
ccagcaggauguugucgggu

SEQ ID NO: 418 - RNA, 20 nt, Artificial Sequence
  Synthetic
guaguugacuggcgaaguuc

SEQ ID NO: 419 - RNA, 20 nt, Artificial Sequence
  Synthetic
ugcggauggccuccaucucc

SEQ ID NO: 420 - RNA, 20 nt, Artificial Sequence
  Synthetic
acaaucuccgccagguagaa

SEQ ID NO: 421 - RNA, 20 nt, Artificial Sequence
  Synthetic
gcgaauacacccagcgccca

SEQ ID NO: 422 - RNA, 20 nt, Artificial Sequence
  Synthetic
guaguucucauccuggaagg

SEQ ID NO: 423 - RNA, 20 nt, Artificial Sequence
  Synthetic
ggcucaggcucugccgggug

SEQ ID NO: 424 - RNA, 20 nt, Artificial Sequence
  Synthetic
ccauucaccaacacgucccu

SEQ ID NO: 425 - RNA, 20 nt, Artificial Sequence
  Synthetic
accagguacagguaguucuc

SEQ ID NO: 426 - DNA, 20 bp, Artificial Sequence
  Synthetic
ctgcaguuugcccauccacg

SEQ ID NO: 427 - RNA, 20 nt, Artificial Sequence
  Synthetic
uuguucaugaucuucauggc

SEQ ID NO: 428 - RNA, 19 nt, Artificial Sequence
  Synthetic
uugaugucccugugcacgu

SEQ ID NO: 429 - RNA, 20 nt, Artificial Sequence
  Synthetic
gcgguccagcaggauguugu

SEQ ID NO: 430 - RNA, 20 nt, Artificial Sequence
  Synthetic
gucuauggccaugacaaucu

SEQ ID NO: 431 - RNA, 20 nt, Artificial Sequence
  Synthetic
ggagcagggaaagcgccucc

SEQ ID NO: 432 - RNA, 20 nt, Artificial Sequence
  Synthetic
ugccucgcguaguugacugg

SEQ ID NO: 433 - RNA, 20 nt, Artificial Sequence
  Synthetic
gcggauggccuccaucuccc

SEQ ID NO: 434 - RNA, 20 nt, Artificial Sequence
  Synthetic
uuucauaggcgaauacaccc

SEQ ID NO: 435 - RNA, 20 nt, Artificial Sequence
  Synthetic
gccugucagcgagucggagg

SEQ ID NO: 436 - RNA, 20 nt, Artificial Sequence
  Synthetic
ccacuucagcuguuucaucc

SEQ ID NO: 437 - RNA, 20 nt, Artificial Sequence
  Synthetic
cauccgcuccugcaacugcc

SEQ ID NO: 438 - RNA, 20 nt, Artificial Sequence
  Synthetic
ucuaggguucagggagcgcg

SEQ ID NO: 439 - RNA, 20 nt, Artificial Sequence
  Synthetic
caccaacacgucccucuccu

SEQ ID NO: 440 - RNA, 20 nt, Artificial Sequence
  Synthetic
caggagcagggaaagcgccu

SEQ ID NO: 441 - RNA, 20 nt, Artificial Sequence
  Synthetic
caaucuccgccagguagaag

SEQ ID NO: 442 - RNA, 20 nt, Artificial Sequence
  Synthetic
auguugucggguuugauguc

SEQ ID NO: 443 - RNA, 20 nt, Artificial Sequence
  Synthetic
ccauccgcuccugcaacugc

SEQ ID NO: 444 - RNA, 20 nt, Artificial Sequence
  Synthetic
gcgucaccucggccucagcc

SEQ ID NO: 445 - RNA, 20 nt, Artificial Sequence
  Synthetic
gagggccuuuuauucgcgag

SEQ ID NO: 446 - RNA, 20 nt, Artificial Sequence
  Synthetic
agcggcagagagaggugcuc

SEQ ID NO: 447 - RNA, 20 nt, Artificial Sequence
  Synthetic
cauccaaaacguggauuggg

SEQ ID NO: 448 - RNA, 20 nt, Artificial Sequence
  Synthetic
uugggcagauggagggccuu

SEQ ID NO: 449 - RNA, 20 nt, Artificial Sequence
  Synthetic
ccucugccucgcguaguuga

SEQ ID NO: 450 - RNA, 20 nt, Artificial Sequence
  Synthetic
acagaacaacggcgaacagg

SEQ ID NO: 451 - RNA, 20 nt, Artificial Sequence
  Synthetic
caggauguugucggguuuga

SEQ ID NO: 452 - RNA, 20 nt, Artificial Sequence
  Synthetic
cggccucagccucugccgca

SEQ ID NO: 453 - RNA, 20 nt, Artificial Sequence
  Synthetic
cagcaggauguugucggguu

SEQ ID NO: 454 - RNA, 20 nt, Artificial Sequence
  Synthetic
gcagagagaggugcuccuug

SEQ ID NO: 455 - RNA, 20 nt, Artificial Sequence
  Synthetic
uccaguuccauggguguggg

SEQ ID NO: 456 - RNA, 20 nt, Artificial Sequence
  Synthetic
ccucagccuggccgaaagaa

SEQ ID NO: 457 - RNA, 20 nt, Artificial Sequence
  Synthetic
gggccuuuuauucgcgaggg

SEQ ID NO: 458 - RNA, 20 nt, Artificial Sequence
  Synthetic
gucggccaggcggauguggc

SEQ ID NO: 459 - RNA, 20 nt, Artificial Sequence
  Synthetic
gcuugcugccuucccaggcc

SEQ ID NO: 460 - RNA, 20 nt, Artificial Sequence
  Synthetic
gguccagcaggauguugucg

SEQ ID NO: 461 - RNA, 20 nt, Artificial Sequence
  Synthetic
cggagaccaucccagucgag

SEQ ID NO: 462 - RNA, 19 nt, Artificial Sequence
  Synthetic
ucugccucgcguagugacu

SEQ ID NO: 463 - RNA, 20 nt, Artificial Sequence
  Synthetic
agguaguucucauccuggaa

SEQ ID NO: 464 - RNA, 20 nt, Artificial Sequence
  Synthetic
uccuuguaguggacgaucuu

SEQ ID NO: 465 - RNA, 20 nt, Artificial Sequence
  Synthetic
gcauccaaaacguggauugg

SEQ ID NO: 466 - RNA, 19 nt, Artificial Sequence
  Synthetic
guccagcaggaugugucgg

SEQ ID NO: 467 - RNA, 20 nt, Artificial Sequence
  Synthetic
agcucccgcagcgucaccuc

SEQ ID NO: 468 - RNA, 20 nt, Artificial Sequence
  Synthetic
cgagagcagcgcaagugagg

SEQ ID NO: 469 - RNA, 20 nt, Artificial Sequence
  Synthetic
cagggaaagcgccuccgaua

SEQ ID NO: 470 - RNA, 20 nt, Artificial Sequence
  Synthetic
auuucauaggcgaauacacc

SEQ ID NO: 471 - RNA, 20 nt, Artificial Sequence
  Synthetic
ucggccaggcggauguggcc

SEQ ID NO: 472 - RNA, 20 nt, Artificial Sequence
  Synthetic
aagggauguguccggaaguc

SEQ ID NO: 473 - RNA, 20 nt, Artificial Sequence
  Synthetic
cuuguaguggacgaucuugc

SEQ ID NO: 474 - RNA, 20 nt, Artificial Sequence
  Synthetic
agucggccaggcggaugugg

SEQ ID NO: 475 - RNA, 20 nt, Artificial Sequence
  Synthetic
gccucagccuggccgaaaga

SEQ ID NO: 476 - RNA, 20 nt, Artificial Sequence
  Synthetic
agcgucaccucggccucagc

SEQ ID NO: 477 - DNA, 20 bp, Artificial Sequence
  Synthetic
cagcggcagagagaggugct

SEQ ID NO: 478 - RNA, 20 nt, Artificial Sequence
  Synthetic
ccagcggcagagagaggugc

SEQ ID NO: 479 - RNA, 20 nt, Artificial Sequence
  Synthetic
uuguaguggacgaucuugcc

SEQ ID NO: 480 - RNA, 20 nt, Artificial Sequence
  Synthetic
agggaaagcgccuccgauag

SEQ ID NO: 481 - RNA, 20 nt, Artificial Sequence
  Synthetic
gggaaagcgccuccgauagg

SEQ ID NO: 482 - DNA, 20 bp, Artificial Sequence
  Synthetic
ggcagcaagccgggccgtcc

SEQ ID NO: 483 - DNA, 20 bp, Artificial Sequence
  Synthetic
cagtcctgtgatccgggccc

SEQ ID NO: 484 - DNA, 20 bp, Artificial Sequence
  Synthetic
gacactgctgagcaagtttg

SEQ ID NO: 485 - DNA, 20 bp, Artificial Sequence
  Synthetic
tgacactgctgagcaagttt

SEQ ID NO: 486 - DNA, 20 bp, Artificial Sequence
  Synthetic
cgggagatggaggccatccg

SEQ ID NO: 487 - DNA, 20 bp, Artificial Sequence
  Synthetic
gggagcggattccggccgag

SEQ ID NO: 488 - DNA, 20 bp, Artificial Sequence
  Synthetic
ggagcggattccggccgaga

SEQ ID NO: 489 - DNA, 20 bp, Artificial Sequence
  Synthetic
cctgctgacactgctgagca

SEQ ID NO: 490 - DNA, 20 bp, Artificial Sequence
  Synthetic
agggacatcaaacccgacaa

SEQ ID NO: 491 - DNA, 20 bp, Artificial Sequence
  Synthetic
gggacatcaaacccgacaac

SEQ ID NO: 492 - DNA, 20 bp, Artificial Sequence
  Synthetic
gcgcgcttctacctggcgga

SEQ ID NO: 493 - DNA, 20 bp, Artificial Sequence
  Synthetic
cgggccaggtgtatgccatg

SEQ ID NO: 494 - DNA, 20 bp, Artificial Sequence
  Synthetic
ctgacactgctgagcaagtt

SEQ ID NO: 495 - DNA, 20 bp, Artificial Sequence
  Synthetic
ggcggtggatcacgcagctg

SEQ ID NO: 496 - DNA, 20 bp, Artificial Sequence
  Synthetic
gagacactgtcggacattcg

SEQ ID NO: 497 - DNA, 20 bp, Artificial Sequence
  Synthetic
acatccgcctggccgacttc

SEQ ID NO: 498 - DNA, 20 bp, Artificial Sequence
  Synthetic
cagggacatcaaacccgaca

SEQ ID NO: 499 - DNA, 20 bp, Artificial Sequence
  Synthetic
ccgggagatggaggccatcc

SEQ ID NO: 500 - DNA, 20 bp, Artificial Sequence
  Synthetic
atcaaacccgacaacatcct

SEQ ID NO: 501 - DNA, 20 bp, Artificial Sequence
  Synthetic
acagggacatcaaacccgac

SEQ ID NO: 502 - DNA, 20 bp, Artificial Sequence
  Synthetic
gtacctggtcatggagtatt

SEQ ID NO: 503 - DNA, 20 bp, Artificial Sequence
  Synthetic
ccatgaagatcatgaacaag

SEQ ID NO: 504 - DNA, 20 bp, Artificial Sequence
  Synthetic
ccacgttttggatgcactga

SEQ ID NO: 505 - DNA, 20 bp, Artificial Sequence
  Synthetic
tgggatggtctccgggacag

SEQ ID NO: 506 - DNA, 20 bp, Artificial Sequence
  Synthetic
gacagtgaggtcccaggccc

SEQ ID NO: 507 - DNA, 20 bp, Artificial Sequence
  Synthetic
gtcatggagtattacgtggg

SEQ ID NO: 508 - DNA, 20 bp, Artificial Sequence
  Synthetic
cggctgtccctgcggcagag

SEQ ID NO: 509 - DNA, 20 bp, Artificial Sequence
  Synthetic
cggcttggctacgtgcacag

SEQ ID NO: 510 - DNA, 20 bp, Artificial Sequence
  Synthetic
ggccctgacgtggatgggca

SEQ ID NO: 511 - DNA, 20 bp, Artificial Sequence
  Synthetic
cctggcctatcggaggcgct

SEQ ID NO: 512 - DNA, 20 bp, Artificial Sequence
  Synthetic
ccggcttggctacgtgcaca

SEQ ID NO: 513 - DNA, 20 bp, Artificial Sequence
  Synthetic
agaactacctgtacctggtc

SEQ ID NO: 514 - DNA, 20 bp, Artificial Sequence
  Synthetic
gcggattccggccgagatgg

SEQ ID NO: 515 - DNA, 20 bp, Artificial Sequence
  Synthetic
agcggattccggccgagatg

SEQ ID NO: 516 - DNA, 20 bp, Artificial Sequence
  Synthetic
acggcggagacctatggcaa

SEQ ID NO: 517 - DNA, 20 bp, Artificial Sequence
  Synthetic
acatcctgctggaccgctgt

SEQ ID NO: 518 - DNA, 20 bp, Artificial Sequence
  Synthetic
tggcctatcggaggcgcttt

SEQ ID NO: 519 - DNA, 20 bp, Artificial Sequence
  Synthetic
cacatcccttcttctttggc

SEQ ID NO: 520 - DNA, 20 bp, Artificial Sequence
  Synthetic
tggtcatggagtattacgtg

SEQ ID NO: 521 - DNA, 20 bp, Artificial Sequence
  Synthetic
gagcggattccggccgagat

SEQ ID NO: 522 - DNA, 20 bp, Artificial Sequence
  Synthetic
agcggtagtgaagatgaagc

SEQ ID NO: 523 - DNA, 20 bp, Artificial Sequence
  Synthetic
cggattccggccgagatggc

SEQ ID NO: 524 - DNA, 20 bp, Artificial Sequence
  Synthetic
agttccagcggctgtccctg

SEQ ID NO: 525 - DNA, 20 bp, Artificial Sequence
  Synthetic
tacctggcggagattgtcat

SEQ ID NO: 526 - DNA, 20 bp, Artificial Sequence
  Synthetic
tggcggagattgtcatggcc

SEQ ID NO: 527 - DNA, 20 bp, Artificial Sequence
  Synthetic
tgtacctggtcatggagtat

SEQ ID NO: 528 - DNA, 20 bp, Artificial Sequence
  Synthetic
caactacgcgaggcagaggc

SEQ ID NO: 529 - DNA, 20 bp, Artificial Sequence
  Synthetic
ggagacactgtcggacattc

SEQ ID NO: 530 - DNA, 20 bp, Artificial Sequence
  Synthetic
agctgcgggcagatggaacg

SEQ ID NO: 531 - DNA, 20 bp, Artificial Sequence
  Synthetic
caagatcgtccactacaagg

SEQ ID NO: 532 - DNA, 20 bp, Artificial Sequence
  Synthetic
cgcttctacctggcggagat

SEQ ID NO: 533 - DNA, 20 bp, Artificial Sequence
  Synthetic
ctcacccggcagagcctgag

SEQ ID NO: 534 - DNA, 20 bp, Artificial Sequence
  Synthetic
gcggtagtgaagatgaagca

SEQ ID NO: 535 - DNA, 20 bp, Artificial Sequence
  Synthetic
caaacccgacaacatcctgc

SEQ ID NO: 536 - DNA, 20 bp, Artificial Sequence
  Synthetic
ctgcggcagaggctgaggcc

SEQ ID NO: 537 - DNA, 20 bp, Artificial Sequence
  Synthetic
ggacatcaaacccgacaaca

SEQ ID NO: 538 - DNA, 20 bp, Artificial Sequence
  Synthetic
ggtcatggagtattacgtgg

SEQ ID NO: 539 - DNA, 20 bp, Artificial Sequence
  Synthetic
gctgcgggcagatggaacgg

SEQ ID NO: 540 - DNA, 20 bp, Artificial Sequence
  Synthetic
tctgcctgcttactcgggaa

SEQ ID NO: 541 - DNA, 20 bp, Artificial Sequence
  Synthetic
ggtgtatgccatgaagatca

SEQ ID NO: 542 - DNA, 20 bp, Artificial Sequence
  Synthetic
cagttccagcggctgtccct

SEQ ID NO: 543 - DNA, 20 bp, Artificial Sequence
  Synthetic
tgcacagggacatcaaaccc

SEQ ID NO: 544 - DNA, 20 bp, Artificial Sequence
  Synthetic
ctacctggcggagattgtca

SEQ ID NO: 545 - DNA, 20 bp, Artificial Sequence
  Synthetic
catcctgctggaccgctgtg

SEQ ID NO: 546 - DNA, 20 bp, Artificial Sequence
  Synthetic
gggcagacgcccttctacgc

SEQ ID NO: 547 - DNA, 20 bp, Artificial Sequence
  Synthetic
tccctgcggcagaggctgag

SEQ ID NO: 548 - DNA, 20 bp, Artificial Sequence
  Synthetic
cgttttggatgcactgagac

SEQ ID NO: 549 - DNA, 20 bp, Artificial Sequence
  Synthetic
gacctatggcaagatcgtcc

SEQ ID NO: 550 - DNA, 20 bp, Artificial Sequence
  Synthetic
ggacctgctgacactgctga

SEQ ID NO: 551 - DNA, 20 bp, Artificial Sequence
  Synthetic
gtctggcgccgcccaggagc

SEQ ID NO: 552 - DNA, 20 bp, Artificial Sequence
  Synthetic
aaacccgacaacatcctgct

SEQ ID NO: 553 - DNA, 20 bp, Artificial Sequence
  Synthetic
cggcagttgcaggagcggat

SEQ ID NO: 554 - DNA, 20 bp, Artificial Sequence
  Synthetic
gaggcgctttccctgctcct

SEQ ID NO: 555 - DNA, 20 bp, Artificial Sequence
  Synthetic
gaagcagacgggccaggtgt

SEQ ID NO: 556 - DNA, 20 bp, Artificial Sequence
  Synthetic
tgtgactggtgggcgctggg

SEQ ID NO: 557 - DNA, 20 bp, Artificial Sequence
  Synthetic
ttgctgcaggcagagggagc

SEQ ID NO: 558 - DNA, 20 bp, Artificial Sequence
  Synthetic
tcacccggcagagcctgagc

SEQ ID NO: 559 - DNA, 20 bp, Artificial Sequence
  Synthetic
tacgtgcacagggacatcaa

SEQ ID NO: 560 - DNA, 20 bp, Artificial Sequence
  Synthetic
cctgcggcagaggctgaggc

SEQ ID NO: 561 - DNA, 20 bp, Artificial Sequence
  Synthetic
cttccaggatgagaactacc

SEQ ID NO: 562 - DNA, 20 bp, Artificial Sequence
  Synthetic
agtgtgactggtgggcgctg

SEQ ID NO: 563 - DNA, 20 bp, Artificial Sequence
  Synthetic
cactgctgagcaagtttggg

SEQ ID NO: 564 - DNA, 20 bp, Artificial Sequence
  Synthetic
cggcggagacctatggcaag

SEQ ID NO: 565 - DNA, 20 bp, Artificial Sequence
  Synthetic
aagcagacgggccaggtgta

SEQ ID NO: 566 - DNA, 20 bp, Artificial Sequence
  Synthetic
gtgtgactggtgggcgctgg

SEQ ID NO: 567 - DNA, 20 bp, Artificial Sequence
  Synthetic
ctttcggccaggctgaggcc

SEQ ID NO: 568 - DNA, 20 bp, Artificial Sequence
  Synthetic
gcttctacctggcggagatt

SEQ ID NO: 569 - DNA, 20 bp, Artificial Sequence
  Synthetic
acgggccaggtgtatgccat

SEQ ID NO: 570 - DNA, 20 bp, Artificial Sequence
  Synthetic
cctggcggagattgtcatgg

SEQ ID NO: 571 - DNA, 20 bp, Artificial Sequence
  Synthetic
ctgctgagcaagtttgggga

SEQ ID NO: 572 - DNA, 20 bp, Artificial Sequence
  Synthetic
acatcaaacccgacaacatc

SEQ ID NO: 573 - DNA, 20 bp, Artificial Sequence
  Synthetic
cctgacgtggatgggcaaac

SEQ ID NO: 574 - DNA, 20 bp, Artificial Sequence
  Synthetic
gcagcaagccgggccgtccg

SEQ ID NO: 575 - DNA, 20 bp, Artificial Sequence
  Synthetic
cgcgcttctacctggcggag

SEQ ID NO: 576 - DNA, 20 bp, Artificial Sequence
  Synthetic
aggatgagaactacctgtac

SEQ ID NO: 577 - DNA, 20 bp, Artificial Sequence
  Synthetic
gttctatgggcagacgccct

SEQ ID NO: 578 - DNA, 20 bp, Artificial Sequence
  Synthetic
ctgctggaccgctgtggcca

SEQ ID NO: 579 - DNA, 20 bp, Artificial Sequence
  Synthetic
aacttcgccagtcaactacg

SEQ ID NO: 580 - DNA, 20 bp, Artificial Sequence
  Synthetic
gcggctgtccctgcggcaga

SEQ ID NO: 581 - DNA, 20 bp, Artificial Sequence
  Synthetic
ctggcctatcggaggcgctt

SEQ ID NO: 582 - DNA, 20 bp, Artificial Sequence
  Synthetic
ctgttcgccgttgttctgtc

SEQ ID NO: 583 - DNA, 20 bp, Artificial Sequence
  Synthetic
acctgctgacactgctgagc

SEQ ID NO: 584 - DNA, 20 bp, Artificial Sequence
  Synthetic
gtgtatgccatgaagatcat

SEQ ID NO: 585 - DNA, 20 bp, Artificial Sequence
  Synthetic
ccctgacgtggatgggcaaa

SEQ ID NO: 586 - DNA, 20 bp, Artificial Sequence
  Synthetic
gctgacactgctgagcaagt

SEQ ID NO: 587 - DNA, 20 bp, Artificial Sequence
  Synthetic
ctacgtgcacagggacatca

SEQ ID NO: 588 - DNA, 20 bp, Artificial Sequence
  Synthetic
cccgacattcctcggtattt

SEQ ID NO: 589 - DNA, 20 bp, Artificial Sequence
  Synthetic
gggcgctgggtgtattcgcc

SEQ ID NO: 590 - DNA, 20 bp, Artificial Sequence
  Synthetic
ttcctcggtatttattgtct

SEQ ID NO: 591 - DNA, 20 bp, Artificial Sequence
  Synthetic
gtgaagatgaagcagacggg

SEQ ID NO: 592 - DNA, 20 bp, Artificial Sequence
  Synthetic
gatggagttgctgcaggcag

SEQ ID NO: 593 - DNA, 20 bp, Artificial Sequence
  Synthetic
ccctgcggcagaggctgagg

SEQ ID NO: 594 - DNA, 20 bp, Artificial Sequence
  Synthetic
agcaggcgacttccggacac

SEQ ID NO: 595 - DNA, 20 bp, Artificial Sequence
  Synthetic
ctgcttgagccacacgtgca

SEQ ID NO: 596 - DNA, 20 bp, Artificial Sequence
  Synthetic
attcctcggtatttattgtc

SEQ ID NO: 597 - DNA, 20 bp, Artificial Sequence
  Synthetic
ctggcggagattgtcatggc

SEQ ID NO: 598 - DNA, 20 bp, Artificial Sequence
  Synthetic
gggatggtctccgggacagc

SEQ ID NO: 599 - DNA, 20 bp, Artificial Sequence
  Synthetic
actacctgtacctggtcatg

SEQ ID NO: 600 - DNA, 20 bp, Artificial Sequence
  Synthetic
gagtgtgactggtgggcgct

SEQ ID NO: 601 - DNA, 20 bp, Artificial Sequence
  Synthetic
acgttttggatgcactgaga

SEQ ID NO: 602 - DNA, 20 bp, Artificial Sequence
  Synthetic
aggccctccatctgcccaaa

SEQ ID NO: 603 - DNA, 20 bp, Artificial Sequence
  Synthetic
gctacgtgcacagggacatc

SEQ ID NO: 604 - DNA, 20 bp, Artificial Sequence
  Synthetic
gggacctgctgacactgctg

SEQ ID NO: 605 - DNA, 20 bp, Artificial Sequence
  Synthetic
acctggcggagattgtcatg

SEQ ID NO: 606 - DNA, 20 bp, Artificial Sequence
  Synthetic
catgaagatcatgaacaagt

SEQ ID NO: 607 - DNA, 20 bp, Artificial Sequence
  Synthetic
cccttctacgcggattccac

SEQ ID NO: 608 - DNA, 20 bp, Artificial Sequence
  Synthetic
ggcggagattgtcatggcca

SEQ ID NO: 609 - DNA, 20 bp, Artificial Sequence
  Synthetic
cggtatttattgtctgtccc

SEQ ID NO: 610 - DNA, 20 bp, Artificial Sequence
  Synthetic
tgagcaagtttggggagcgg

SEQ ID NO: 611 - DNA, 20 bp, Artificial Sequence
  Synthetic
acccggcagagcctgagccg

SEQ ID NO: 612 - DNA, 20 bp, Artificial Sequence
  Synthetic
tctggcgccgcccaggagcc

SEQ ID NO: 613 - DNA, 20 bp, Artificial Sequence
  Synthetic
ctgcctgcttactcgggaaa

SEQ ID NO: 614 - DNA, 20 bp, Artificial Sequence
  Synthetic
catcaaacccgacaacatcc

SEQ ID NO: 615 - DNA, 20 bp, Artificial Sequence
  Synthetic
tccaggatgagaactacctg

SEQ ID NO: 616 - DNA, 20 bp, Artificial Sequence
  Synthetic
tatgaaatgttctatgggca

SEQ ID NO: 617 - DNA, 20 bp, Artificial Sequence
  Synthetic
gccttccaggatgagaacta

SEQ ID NO: 618 - DNA, 20 bp, Artificial Sequence
  Synthetic
ggctacgtgcacagggacat

SEQ ID NO: 619 - DNA, 20 bp, Artificial Sequence
  Synthetic
agtcctgtgatccgggcccg

SEQ ID NO: 620 - DNA, 20 bp, Artificial Sequence
  Synthetic
acctatggcaagatcgtcca

SEQ ID NO: 621 - DNA, 20 bp, Artificial Sequence
  Synthetic
ggtggcccacgccggccaac

SEQ ID NO: 622 - DNA, 20 bp, Artificial Sequence
  Synthetic
cacgttttggatgcactgag

SEQ ID NO: 623 - DNA, 20 bp, Artificial Sequence
  Synthetic
accgacacatgcaacttcga

SEQ ID NO: 624 - DNA, 20 bp, Artificial Sequence
  Synthetic
gccgggccgtccgtgttcca

SEQ ID NO: 625 - DNA, 20 bp, Artificial Sequence
  Synthetic
ctcacttgcgctgctctcgg

SEQ ID NO: 626 - DNA, 20 bp, Artificial Sequence
  Synthetic
cacgtccggcagttgcagga

SEQ ID NO: 627 - DNA, 20 bp, Artificial Sequence
  Synthetic
ggagagggacgtgttggtga

SEQ ID NO: 628 - DNA, 20 bp, Artificial Sequence
  Synthetic
ggatggagttgctgcaggca

SEQ ID NO: 629 - DNA, 20 bp, Artificial Sequence
  Synthetic
tggtggcccacgccggccaa

SEQ ID NO: 630 - DNA, 20 bp, Artificial Sequence
  Synthetic
actacgcgaggcagaggctc

SEQ ID NO: 631 - DNA, 20 bp, Artificial Sequence
  Synthetic
ttctatgggcagacgccctt

SEQ ID NO: 632 - DNA, 20 bp, Artificial Sequence
  Synthetic
cctcggtatttattgtctgt

SEQ ID NO: 633 - DNA, 20 bp, Artificial Sequence
  Synthetic
tcggtatttattgtctgtcc

SEQ ID NO: 634 - DNA, 20 bp, Artificial Sequence
  Synthetic
cgggacctagaggcacacgt

SEQ ID NO: 635 - DNA, 20 bp, Artificial Sequence
  Synthetic
ccgttgttctgtctcgtgcc

SEQ ID NO: 636 - DNA, 20 bp, Artificial Sequence
  Synthetic
gaactacctgtacctggtca

SEQ ID NO: 637 - DNA, 20 bp, Artificial Sequence
  Synthetic
gaggtgctcacccggcagag

SEQ ID NO: 638 - DNA, 20 bp, Artificial Sequence
  Synthetic
tctacctggcggagattgtc

SEQ ID NO: 639 - DNA, 20 bp, Artificial Sequence
  Synthetic
gcgcttctacctggcggaga

SEQ ID NO: 640 - DNA, 20 bp, Artificial Sequence
  Synthetic
gtcaactacgcgaggcagag

SEQ ID NO: 641 - DNA, 20 bp, Artificial Sequence
  Synthetic
ggccctccatctgcccaaag

SEQ ID NO: 642 - DNA, 20 bp, Artificial Sequence
  Synthetic
ccaggatgagaactacctgt

SEQ ID NO: 643 - DNA, 20 bp, Artificial Sequence
  Synthetic
acactgctgagcaagtttgg

SEQ ID NO: 644 - DNA, 20 bp, Artificial Sequence
  Synthetic
cacagggacatcaaacccga

SEQ ID NO: 645 - DNA, 20 bp, Artificial Sequence
  Synthetic
gcctgggaaggcagcaagcc

SEQ ID NO: 646 - DNA, 20 bp, Artificial Sequence
  Synthetic
caggatgagaactacctgta

SEQ ID NO: 647 - DNA, 20 bp, Artificial Sequence
  Synthetic
gccctgacgtggatgggcaa

SEQ ID NO: 648 - DNA, 20 bp, Artificial Sequence
  Synthetic
gatgagaactacctgtacct

SEQ ID NO: 649 - DNA, 20 bp, Artificial Sequence
  Synthetic
ctcggtatttattgtctgtc

SEQ ID NO: 650 - DNA, 20 bp, Artificial Sequence
  Synthetic
ttcgcctatgaaatgttcta

SEQ ID NO: 651 - DNA, 20 bp, Artificial Sequence
  Synthetic
cctcgcgaataaaaggccct

SEQ ID NO: 652 - DNA, 20 bp, Artificial Sequence
  Synthetic
gccagtcaactacgcgaggc

SEQ ID NO: 653 - DNA, 20 bp, Artificial Sequence
  Synthetic
acccgacaacatcctgctgg

SEQ ID NO: 654 - DNA, 20 bp, Artificial Sequence
  Synthetic
gaacttcgccagtcaactac

SEQ ID NO: 655 - DNA, 20 bp, Artificial Sequence
  Synthetic
ggagatggaggccatccgca

SEQ ID NO: 656 - DNA, 20 bp, Artificial Sequence
  Synthetic
ttctacctggcggagattgt

SEQ ID NO: 657 - DNA, 20 bp, Artificial Sequence
  Synthetic
tgggcgctgggtgtattcgc

SEQ ID NO: 658 - DNA, 20 bp, Artificial Sequence
  Synthetic
ccttccaggatgagaactac

SEQ ID NO: 659 - DNA, 20 bp, Artificial Sequence
  Synthetic
cacccggcagagcctgagcc

SEQ ID NO: 660 - DNA, 20 bp, Artificial Sequence
  Synthetic
agggacgtgttggtgaatgg

SEQ ID NO: 661 - DNA, 20 bp, Artificial Sequence
  Synthetic
gagaactacctgtacctggt

SEQ ID NO: 662 - DNA, 20 bp, Artificial Sequence
  Synthetic
cgtggatgggcaaactgcag

SEQ ID NO: 663 - DNA, 20 bp, Artificial Sequence
  Synthetic
gccatgaagatcatgaacaa

SEQ ID NO: 664 - DNA, 20 bp, Artificial Sequence
  Synthetic
acgtgcacagggacatcaaa

SEQ ID NO: 665 - DNA, 20 bp, Artificial Sequence
  Synthetic
acaacatcctgctggaccgc

SEQ ID NO: 666 - DNA, 20 bp, Artificial Sequence
  Synthetic
agattgtcatggccatagac

SEQ ID NO: 667 - DNA, 20 bp, Artificial Sequence
  Synthetic
ggaggcgctttccctgctcc

SEQ ID NO: 668 - DNA, 20 bp, Artificial Sequence
  Synthetic
ccagtcaactacgcgaggca

SEQ ID NO: 669 - DNA, 20 bp, Artificial Sequence
  Synthetic
gggagatggaggccatccgc

SEQ ID NO: 670 - DNA, 20 bp, Artificial Sequence
  Synthetic
gggtgtattcgcctatgaaa

SEQ ID NO: 671 - DNA, 20 bp, Artificial Sequence
  Synthetic
cctccgactcgctgacaggc

SEQ ID NO: 672 - DNA, 20 bp, Artificial Sequence
  Synthetic
ggatgaaacagctgaagtgg

SEQ ID NO: 673 - DNA, 20 bp, Artificial Sequence
  Synthetic
ggcagttgcaggagcggatg

SEQ ID NO: 674 - DNA, 20 bp, Artificial Sequence
  Synthetic
cgcgctccctgaaccctaga

SEQ ID NO: 675 - DNA, 20 bp, Artificial Sequence
  Synthetic
aggagagggacgtgttggtg

SEQ ID NO: 676 - DNA, 20 bp, Artificial Sequence
  Synthetic
aggcgctttccctgctcctg

SEQ ID NO: 677 - DNA, 20 bp, Artificial Sequence
  Synthetic
cttctacctggcggagattg

SEQ ID NO: 678 - DNA, 20 bp, Artificial Sequence
  Synthetic
gacatcaaacccgacaacat

SEQ ID NO: 679 - DNA, 20 bp, Artificial Sequence
  Synthetic
gcagttgcaggagcggatgg

SEQ ID NO: 680 - DNA, 20 bp, Artificial Sequence
  Synthetic
ggctgaggccgaggtgacgc

SEQ ID NO: 681 - DNA, 20 bp, Artificial Sequence
  Synthetic
ctcgcgaataaaaggccctc

SEQ ID NO: 682 - DNA, 20 bp, Artificial Sequence
  Synthetic
gagcacctctctctgccgct

SEQ ID NO: 683 - DNA, 20 bp, Artificial Sequence
  Synthetic
cccaatccacgttttggatg

SEQ ID NO: 684 - DNA, 20 bp, Artificial Sequence
  Synthetic
aaggccctccatctgcccaa

SEQ ID NO: 685 - DNA, 20 bp, Artificial Sequence
  Synthetic
tcaactacgcgaggcagagg

SEQ ID NO: 686 - DNA, 20 bp, Artificial Sequence
  Synthetic
cctgttcgccgttgttctgt

SEQ ID NO: 687 - DNA, 20 bp, Artificial Sequence
  Synthetic
tcaaacccgacaacatcctg

SEQ ID NO: 688 - DNA, 20 bp, Artificial Sequence
  Synthetic
tgcggcagaggctgaggccg

SEQ ID NO: 689 - DNA, 20 bp, Artificial Sequence
  Synthetic
aacccgacaacatcctgctg

SEQ ID NO: 690 - DNA, 20 bp, Artificial Sequence
  Synthetic
caaggagcacctctctctgc

SEQ ID NO: 691 - DNA, 20 bp, Artificial Sequence
  Synthetic
cccacacccatggaactgga

SEQ ID NO: 692 - DNA, 20 bp, Artificial Sequence
  Synthetic
ttctttcggccaggctgagg

SEQ ID NO: 693 - DNA, 20 bp, Artificial Sequence
  Synthetic
ccctcgcgaataaaaggccc

SEQ ID NO: 694 - DNA, 20 bp, Artificial Sequence
  Synthetic
gccacatccgcctggccgac

SEQ ID NO: 695 - DNA, 20 bp, Artificial Sequence
  Synthetic
ggcctgggaaggcagcaagc

SEQ ID NO: 696 - DNA, 20 bp, Artificial Sequence
  Synthetic
cgacaacatcctgctggacc

SEQ ID NO: 697 - DNA, 20 bp, Artificial Sequence
  Synthetic
ctcgactgggatggtctccg

SEQ ID NO: 698 - DNA, 20 bp, Artificial Sequence
  Synthetic
agtcaactacgcgaggcaga

SEQ ID NO: 699 - DNA, 20 bp, Artificial Sequence
  Synthetic
ttccaggatgagaactacct

SEQ ID NO: 700 - DNA, 20 bp, Artificial Sequence
  Synthetic
aagatcgtccactacaagga

SEQ ID NO: 701 - DNA, 20 bp, Artificial Sequence
  Synthetic
ccaatccacgttttggatgc

SEQ ID NO: 702 - DNA, 20 bp, Artificial Sequence
  Synthetic
ccgacaacatcctgctggac

SEQ ID NO: 703 - DNA, 20 bp, Artificial Sequence
  Synthetic
gaggtgacgctgcgggagct

SEQ ID NO: 704 - DNA, 20 bp, Artificial Sequence
  Synthetic
cctcacttgcgctgctctcg

SEQ ID NO: 705 - DNA, 20 bp, Artificial Sequence
  Synthetic
tatcggaggcgctttccctg

SEQ ID NO: 706 - DNA, 20 bp, Artificial Sequence
  Synthetic
ggtgtattcgcctatgaaat

SEQ ID NO: 707 - DNA, 20 bp, Artificial Sequence
  Synthetic
ggccacatccgcctggccga

SEQ ID NO: 708 - DNA, 20 bp, Artificial Sequence
  Synthetic
gacttccggacacatccctt

SEQ ID NO: 709 - DNA, 20 bp, Artificial Sequence
  Synthetic
gcaagatcgtccactacaag

SEQ ID NO: 710 - DNA, 20 bp, Artificial Sequence
  Synthetic
ccacatccgcctggccgact

SEQ ID NO: 711 - DNA, 20 bp, Artificial Sequence
  Synthetic
tctttcggccaggctgaggc

SEQ ID NO: 712 - DNA, 20 bp, Artificial Sequence
  Synthetic
gctgaggccgaggtgacgct

SEQ ID NO: 713 - DNA, 20 bp, Artificial Sequence
  Synthetic
agcacctctctctgccgctg

SEQ ID NO: 714 - DNA, 20 bp, Artificial Sequence
  Synthetic
gcacctctctctgccgctgg

SEQ ID NO: 715 - DNA, 20 bp, Artificial Sequence
  Synthetic
ggcaagatcgtccactacaa

SEQ ID NO: 716 - DNA, 20 bp, Artificial Sequence
  Synthetic
ctatcggaggcgctttccct

SEQ ID NO: 717 - DNA, 20 bp, Artificial Sequence
  Synthetic
cctatcggaggcgctttccc

SEQ ID NO: 718 - protein, 7 aa, Artificial Sequence
  Synthetic
ASSLNIA

SEQ ID NO: 719 - protein, 12 aa, Artificial Sequence
  Synthetic
SKTFNTHPQSTP

SEQ ID NO: 720 - protein, 12 aa, Artificial Sequence
  Synthetic
TARGEHKEEELI

SEQ ID NO: 721 - protein, 9 aa, Artificial Sequence
  Synthetic
CQAQGQLVC

SEQ ID NO: 722 - protein, 9 aa, Artificial Sequence
  Synthetic
CSERSMNFC

SEQ ID NO: 723 - protein, 9 aa, Artificial Sequence
  Synthetic
CPKTRRVPC

SEQ ID NO: 724 - protein, 20 aa, Artificial Sequence
  Synthetic
WLSEAGPVVTVRALRGTGSW

SEQ ID NO: 725 - protein, 9 aa, Artificial Sequence
  Synthetic
CMQHSMRVC

SEQ ID NO: 726 - protein, 7 aa, Artificial Sequence
  Synthetic
DDTRHWG

SEQ ID NO: 727 - DNA, 2859 bp, Homo sapiens
aggggggctggaccaaggggtggggagaaggggaggaggcctcggccggccgcagagagaagtggccagagaggcccaggggacagccagggacaggcagacatgcagccagggctccagggcctggacaggggctgccaggccctgtgacaggaggaccccgagcccccggcccggggaggggccatggtgctgcctgtccaacatgtcagccgaggtgcggctgaggcggctccagcagctggtgttggacccgggcttcctggggctggagcccctgctcgaccttctcctgggcgtccaccaggagctgggcgcctccgaactggcccaggacaagtacgtggccgacttcttgcagtgggcggagcccatcgtggtgaggcttaaggaggtccgactgcagagggacgacttcgagattctgaaggtgatcggacgcggggcgttcagcgaggtagcggtagtgaagatgaagcagacgggccaggtgtatgccatgaagatcatgaacaagtgggacatgctgaagaggggcgaggtgtcgtgcttccgtgaggagagggacgtgttggtgaatggggaccggcggtggatcacgcagctgcacttcgccttccaggatgagaactacctgtacctggtcatggagtattacgtgggcggggacctgctgacactgctgagcaagtttggggagcggattccggccgagatggcgcgcttctacctggcggagattgtcatggccatagactcggtgcaccggcttggctacgtgcacagggacatcaaacccgacaacatcctgctggaccgctgtggccacatccgcctggccgacttcggctcttgcctcaagctgcgggcagatggaacggtgcggtcgctggtggctgtgggcaccccagactacctgtcccccgagatcctgcaggctgtgggcggtgggcctgggacaggcagctacgggcccgagtgtgactggtgggcgctgggtgtattcgcctatgaaatgttctatgggcagacgcccttctacgcggattccacggcggagacctatggcaagatcgtccactacaaggagcacctctctctgccgctggtggacgaaggggtccctgaggaggctcgagacttcattcagcggttgctgtgtcccccggagacacggctgggccggggtggagcaggcgacttccggacacatcccttcttctttggcctcgactgggatggtctccgggacagcgtgcccccctttacaccggatttcgaaggtgccaccgacacatgcaacttcgacttggtggaggacgggctcactgccatggagacactgtcggacattcgggaaggtgcgccgctaggggtccacctgccttttgtgggctactcctactcctgcatggccctcagggacagtgaggtcccaggccccacacccatggaactggaggccgagcagctgcttgagccacacgtgcaagcgcccagcctggagccctcggtgtccccacaggatgaaacagctgaagtggcagttccagcggctgtccctgcggcagaggctgaggccgaggtgacgctgcgggagctccaggaagccctggaggaggaggtgctcacccggcagagcctgagccgggagatggaggccatccgcacggacaaccagaacttcgccagtcaactacgcgaggcagaggctcggaaccgggacctagaggcacacgtccggcagttgcaggagcggatggagttgctgcaggcagagggagccacagctgtcacgggggtccccagtccccgggccacggatccaccttcccatctagatggccccccggccgtggctgtgggccagtgcccgctggtggggccaggccccatgcaccgccgccacctgctgctccctgccagggtccctaggcctggcctatcggaggcgctttccctgctcctgttcgccgttgttctgtctcgtgccgccgccctgggctgcattgggttggtggcccacgccggccaactcaccgcagtctggcgccgcccaggagccgcccgcgctccctgaaccctagaactgtcttcgactccggggccccgttggaagactgagtgcccggggcacggcacagaagccgcgcccaccgcctgccagttcacaaccgctccgagcgtgggtctccgcccagctccagtcctgtgatccgggcccgccccctagcggccggggagggaggggccgggtccgcggccggcgaacggggctcgaagggtccttgtagccgggaatgctgctgctgctgctgctgctgctgctgctgctgctgctgctgctgctgctgctgctgctggggggatcacagaccatttctttctttcggccaggctgaggccctgacgtggatgggcaaactgcaggcctgggaaggcagcaagccgggccgtccgtgttccatcctccacgcacccccacctatcgttggttcgcaaagtgcaaagctttcttgtgcatgacgccctgctctggggagcgtctggcgcgatctctgcctgcttactcgggaaatttgcttttgccaaacccgctttttcggggatcccgcgcccccctcctcacttgcgctgctctcggagccccagccggctccgcccgcttcggcggtttggatatttattgacctcgtcctccgactcgctgacaggctacaggacccccaacaaccccaatccacgttttggatgcactgagaccccgacattcctcggtatttattgtctgtccccacctaggacccccacccccgaccctcgcgaataaaaggccctccatctgcccaaagctctgga

SEQ ID NO: 728 - DNA, 2683 bp, Mus musculus
gaactggccagagagacccaagggatagtcagggacgggcagacatgcagctagggttctggggcctggacaggggcagccaggccctgtgacgggaagaccccgagctccggcccggggaggggccatggtgttgcctgcccaacatgtcagccgaagtgcggctgaggcagctccagcagctggtgctggacccaggcttcctgggactggagcccctgctcgaccttctcctgggcgtccaccaggagctgggtgcctctcacctagcccaggacaagtatgtggccgacttcttgcagtgggtggagcccattgcagcaaggcttaaggaggtccgactgcagagggatgattttgagattttgaaggtgatcgggcgtggggcgttcagcgaggtagcggtggtgaagatgaaacagacgggccaagtgtatgccatgaagattatgaataagtgggacatgctgaagagaggcgaggtgtcgtgcttccgggaagaaagggatgtattagtgaaaggggaccggcgctggatcacacagctgcactttgccttccaggatgagaactacctgtacctggtcatggaatactacgtgggcggggacctgctaacgctgctgagcaagtttggggagcggatccccgccgagatggctcgcttctacctggccgagattgtcatggccatagactccgtgcaccggctgggctacgtgcacagggacatcaaaccagataacattctgctggaccgatgtgggcacattcgcctggcagacttcggctcctgcctcaaactgcagcctgatggaatggtgaggtcgctggtggctgtgggcaccccggactacctgtctcctgagattctgcaggccgttggtggagggcctggggcaggcagctacgggccagagtgtgactggtgggcactgggcgtgttcgcctatgagatgttctatgggcagacccccttctacgcggactccacagccgagacatatgccaagattgtgcactacagggaacacttgtcgctgccgctggcagacacagttgtccccgaggaagctcaggacctcattcgtgggctgctgtgtcctgctgagataaggctaggtcgaggtggggcagacttcgagggtgccacggacacatgcaatttcgatgtggtggaggaccggctcactgccatggtgagcgggggcggggagacgctgtcagacatgcaggaagacatgccccttggggtgcgcctgcccttcgtgggctactcctactgctgcatggccttcagagacaatcaggtcccggaccccacccctatggaactagaggccctgcagttgcctgtgtcagacttgcaagggcttgacttgcagcccccagtgtccccaccggatcaagtggctgaagaggctgacctagtggctgtccctgcccctgtggctgaggcagagaccacggtaacgctgcagcagctccaggaagccctggaagaagaggttctcacccggcagagcctgagccgcgagctggaggccatccggaccgccaaccagaacttctccagccaactacaggaggccgaggtccgaaaccgagacctggaggcgcatgttcggcagctacaggaacggatggagatgctgcaggccccaggagccgcagccatcacgggggtccccagtccccgggccacggatccaccttcccatctagatggccccccggccgtggctgtgggccagtgcccgctggtggggccaggccccatgcaccgccgtcacctgctgctccctgccaggatccctaggcctggcctatccgaggcgcgttgcctgctcctgttcgccgctgctctggctgctgccgccacactgggctgcactgggttggtggcctataccggcggtctcaccccagtctggtgtttcccgggagccaccttcgccccctgaaccctaagactccaagccatctttcatttaggcctcctaggaaggtcgagcgaccagggagcgacccaaagcgtctctgtgcccatcgcgccccccccccccccccaccgctccgctccacacttctgtgagcctgggtccccacccagctccgctcctgtgatccaggcctgccacctggcggccggggagggaggaacagggctcgtgcccagcacccctggttcctgcagagctggtagccaccgctgctgcagcagctgggcattcgccgaccttgctttactcagccccgacgtggatgggcaaactgctcagctcatccgatttcactttttcactctcccagccatcagttacaagccataagcatgagccccctatttccagggacatcccattcccatagtgatggatcagcaagacctctgccagcacacacggagtctttggcttcggacagcctcactcctgggggttgctgcaactccttccccgtgtacacgtctgcactctaacaacggagccacagctgcactcccccctcccccaaagcagtgtgggtatttattgatcttgttatctgactcactgacagactccgggacccacgttttagatgcattgagactcgacattcctcggtatttattgtctgtccccacctacgacctccactcccgacccttgcgaataaaatacttctggtctgccctaaa

SEQ ID NO: 729 - protein, 7 aa, Artificial Sequence
  Synthetic
DIEGRMD

SEQ ID NO: 730 - protein, 197 aa, Artificial Sequence
  Synthetic
FVKIQVKDSAQNSVIIVDKNGRLVYLVENPGGYVAYSKAATVTGKLVHANFGTKKDFEDLYTPVNGSIVIVRAGKITFAEKVANAESLNAIGVLIYMDQTKFPIVNAELSFFGHAHLGTGDPYTPGFPSFNHTQFPPSRSSGLPNIPVQTISRAAAEKLFGNMEGDCPSDWKTDSTCRMVTSESKNVKLTVSNVLKE

SEQ ID NO: 731 - protein, 8 aa, Artificial Sequence
  Synthetic
IDPETGDT

SEQ ID NO: 732 - protein, 17 aa, Artificial Sequence
  Synthetic
WIDPETGDTEYASKFQD

SEQ ID NO: 733 - protein, 5 aa, Artificial Sequence
  Synthetic
  misc_feature (3)..(3): Xaa can be any naturally occurring amino acid
LPXTG

SEQ ID NO: 734 - protein, 17 aa, Artificial Sequence
  Synthetic
WIDPESGDTEYASKFQD

SEQ ID NO: 735 - protein, 8 aa, Artificial Sequence
  Synthetic
GYSFTDYY

SEQ ID NO: 736 - protein, 5 aa, Artificial Sequence
  Synthetic
DYYIN

SEQ ID NO: 737 - protein, 8 aa, Artificial Sequence
  Synthetic
GYSFTDYD

SEQ ID NO: 738 - protein, 5 aa, Artificial Sequence
  Synthetic
DYDIN

SEQ ID NO: 739 - protein, 3 aa, Artificial Sequence
  Synthetic
ETG

SEQ ID NO: 740 - protein, 3 aa, Artificial Sequence
  Synthetic
ESG

SEQ ID NO: 741 - protein, 25 aa, Artificial Sequence [sequence omitted]

SEQ ID NO: 742 - protein, 13 aa, Artificial Sequence
  Synthetic
WVRQAPGKGLEWV

SEQ ID NO: 743 - protein, 30 aa, Artificial Sequence
  Synthetic
RFTISRDNSKNTLYLQMNSLRAEDTAVYYC

SEQ ID NO: 744 - protein, 11 aa, Artificial Sequence
  Synthetic
WGQGTLVTVSS

SEQ ID NO: 745 - protein, 25 aa, Artificial Sequence [sequence omitted]

SEQ ID NO: 746 - protein, 13 aa, Artificial Sequence
  Synthetic
WVRQAPGQGLEWM

SEQ ID NO: 747 - protein, 30 aa, Artificial Sequence
  Synthetic
RVTITADTSTSTAYMELSSLRSEDTAVYYC

SEQ ID NO: 748 - protein, 10 aa, Artificial Sequence
  Synthetic
FGQGTKVEIK

SEQ ID NO: 749 - protein, 25 aa, Artificial Sequence
  Synthetic
QVQLQESGPGLVKPSQTLSLTCTVS

SEQ ID NO: 750 - protein, 13 aa, Artificial Sequence
  Synthetic
WIRQPPGKGLEWI

SEQ ID NO: 751 - protein, 30 aa, Artificial Sequence
  Synthetic
RVTISVDTSKNQFSLKLSSVTAADTAVYYC

SEQ ID NO: 752 - protein, 23 aa, Artificial Sequence
  Synthetic
DIVMTQSPDSLAVSLGERATINC

SEQ ID NO: 753 - protein, 23 aa, Artificial Sequence
  Synthetic
DIQMTQSPSSLSASVGDRVTITC

SEQ ID NO: 754 - protein, 15 aa, Artificial Sequence
  Synthetic
WYQQKPGKAPKLLIY

SEQ ID NO: 755 - protein, 15 aa, Artificial Sequence
  Synthetic
WYQQKPGQPPKLLIY

SEQ ID NO: 756 - protein, 32 aa, Artificial Sequence
  Synthetic
GVPSRFSGSGSGTDFTLTISSLQPEDFATYYC

SEQ ID NO: 757 - protein, 23 aa, Artificial Sequence
  Synthetic
DIVMTQSPLSLPVTPGEPASISC

SEQ ID NO: 758 - protein, 15 aa, Artificial Sequence
  Synthetic
WYLQKPGQSPQLLIY

SEQ ID NO: 759 - protein, 32 aa, Artificial Sequence
  Synthetic
GVPDRFSGSGSGTDFTLKISRVEAEDVGVYYC

SEQ ID NO: 760 - protein, 32 aa, Artificial Sequence
  Synthetic
GVPDRFSGSGSGTDFTLTISSLQAEDFAVYYC

SEQ ID NO: 761 - DNA, 21 bp, Artificial Sequence
  Synthetic
  misc_feature (1)..(21): phosphorothioate linkage
  misc_feature (2)..(6): modified by 2'-MOE
  misc_feature (17)..(21): modified by 2'-MOE
accattttcttccacagggct

SEQ ID NO: 762-768 - skipped (7 entries)

SEQ ID NO: 769 - protein, 447 aa, Artificial Sequence
  Synthetic
EVQLQQSGAELVRPGASVKLSCTASGFNIKDDYMYWVKQRPEQGLEWIGWIDPETGDTEYASKFQDKATVTADTSSNTAYLQLSSLTSEDTAVYYCTLWLRRGLDYWGQGTSVTVSSASTKGPSVFPLAPSSKSTSGGTAALGCLVKDYFPEPVTVSWNSGALTSGVHTFPAVLQSSGLYSLSSVVTVPSSSLGTQTYICNVNHKPSNTKVDKKVEPKSCDKTHTCPPCPAPELLGGPSVFLFPPKPKDTLMISRTPEVTCVVVDVSHEDPEVKFNWYVDGVEVHNAKTKPREEQYNSTYRVVSVLTVLHQDWLNGKEYKCKVSNKALPAPIEKTISKAKGQPREPQVYTLPPSRDELTKNQVSLTCLVKGFYPSDIAVEWESNGQPENNYKTTPPVLDSDGSFFLYSKLTVDKSRWQQGNVFSCSVMHEALHNHYTQKSLSLSPGK

SEQ ID NO: 770 - protein, 447 aa, Artificial Sequence
  Synthetic
EVQLQQSGAELVRPGASVKLSCTASGFNIKDDYMYWVKQRPEQGLEWIGWIDPESGDTEYASKFQDKATVTADTSSNTAYLQLSSLTSEDTAVYYCTLWLRRGLDYWGQGTSVTVSSASTKGPSVFPLAPSSKSTSGGTAALGCLVKDYFPEPVTVSWNSGALTSGVHTFPAVLQSSGLYSLSSVVTVPSSSLGTQTYICNVNHKPSNTKVDKKVEPKSCDKTHTCPPCPAPELLGGPSVFLFPPKPKDTLMISRTPEVTCVVVDVSHEDPEVKFNWYVDGVEVHNAKTKPREEQYNSTYRVVSVLTVLHQDWLNGKEYKCKVSNKALPAPIEKTISKAKGQPREPQVYTLPPSRDELTKNQVSLTCLVKGFYPSDIAVEWESNGQPENNYKTTPPVLDSDGSFFLYSKLTVDKSRWQQGNVFSCSVMHEALHNHYTQKSLSLSPGK

SEQ ID NO: 771 - protein, 450 aa, Artificial Sequence
  Synthetic
QIQLQQSGPELVRPGASVKISCKASGYSFTDYYINWVNQRPGQGLEWIGWIYPGSGNTRYSERFKGKATLTVDTSSNTAYMQLSSLTSEDSAVYFCAREDYYPYHGMDYWGQGTSVTVSSASTKGPSVFPLAPSSKSTSGGTAALGCLVKDYFPEPVTVSWNSGALTSGVHTFPAVLQSSGLYSLSSVVTVPSSSLGTQTYICNVNHKPSNTKVDKKVEPKSCDKTHTCPPCPAPELLGGPSVFLFPPKPKDTLMISRTPEVTCVVVDVSHEDPEVKFNWYVDGVEVHNAKTKPREEQYNSTYRVVSVLTVLHQDWLNGKEYKCKVSNKALPAPIEKTISKAKGQPREPQVYTLPPSRDELTKNQVSLTCLVKGFYPSDIAVEWESNGQPENNYKTTPPVLDSDGSFFLYSKLTVDKSRWQQGNVFSCSVMHEALHNHYTQKSLSLSPGK

SEQ ID NO: 772 - protein, 450 aa, Artificial Sequence
  Synthetic
QIQLQQSGPELVRPGASVKISCKASGYSFTDYDINWVNQRPGQGLEWIGWIYPGSGNTRYSERFKGKATLTVDTSSNTAYMQLSSLTSEDSAVYFCAREDYYPYHGMDYWGQGTSVTVSSASTKGPSVFPLAPSSKSTSGGTAALGCLVKDYFPEPVTVSWNSGALTSGVHTFPAVLQSSGLYSLSSVVTVPSSSLGTQTYICNVNHKPSNTKVDKKVEPKSCDKTHTCPPCPAPELLGGPSVFLFPPKPKDTLMISRTPEVTCVVVDVSHEDPEVKFNWYVDGVEVHNAKTKPREEQYNSTYRVVSVLTVLHQDWLNGKEYKCKVSNKALPAPIEKTISKAKGQPREPQVYTLPPSRDELTKNQVSLTCLVKGFYPSDIAVEWESNGQPENNYKTTPPVLDSDGSFFLYSKLTVDKSRWQQGNVFSCSVMHEALHNHYTQKSLSLSPGK

SEQ ID NO: 773 - protein, 225 aa, Artificial Sequence
  Synthetic
EVQLQQSGAELVRPGASVKLSCTASGFNIKDDYMYWVKQRPEQGLEWIGWIDPETGDTEYASKFQDKATVTADTSSNTAYLQLSSLTSEDTAVYYCTLWLRRGLDYWGQGTSVTVSSASTKGPSVFPLAPSSKSTSGGTAALGCLVKDYFPEPVTVSWNSGALTSGVHTFPAVLQSSGLYSLSSVVTVPSSSLGTQTYICNVNHKPSNTKVDKKVEPKSCDKTHT

SEQ ID NO: 774 - protein, 225 aa, Artificial Sequence
  Synthetic
EVQLQQSGAELVRPGASVKLSCTASGFNIKDDYMYWVKQRPEQGLEWIGWIDPESGDTEYASKFQDKATVTADTSSNTAYLQLSSLTSEDTAVYYCTLWLRRGLDYWGQGTSVTVSSASTKGPSVFPLAPSSKSTSGGTAALGCLVKDYFPEPVTVSWNSGALTSGVHTFPAVLQSSGLYSLSSVVTVPSSSLGTQTYICNVNHKPSNTKVDKKVEPKSCDKTHT

SEQ ID NO: 775 - protein, 228 aa, Artificial Sequence
  Synthetic
QIQLQQSGPELVRPGASVKISCKASGYSFTDYYINWVNQRPGQGLEWIGWIYPGSGNTRYSERFKGKATLTVDTSSNTAYMQLSSLTSEDSAVYFCAREDYYPYHGMDYWGQGTSVTVSSASTKGPSVFPLAPSSKSTSGGTAALGCLVKDYFPEPVTVSWNSGALTSGVHTFPAVLQSSGLYSLSSVVTVPSSSLGTQTYICNVNHKPSNTKVDKKVEPKSCDKTHT

SEQ ID NO: 776 - protein, 228 aa, Artificial Sequence
  Synthetic
QIQLQQSGPELVRPGASVKISCKASGYSFTDYDINWVNQRPGQGLEWIGWIYPGSGNTRYSERFKGKATLTVDTSSNTAYMQLSSLTSEDSAVYFCAREDYYPYHGMDYWGQGTSVTVSSASTKGPSVFPLAPSSKSTSGGTAALGCLVKDYFPEPVTVSWNSGALTSGVHTFPAVLQSSGLYSLSSVVTVPSSSLGTQTYICNVNHKPSNTKVDKKVEPKSCDKTHT

SEQ ID NO: 777 - protein, 230 aa, Artificial Sequence
  Synthetic
QVQLVQSGAEVKKPGESLKISCKGSGYSFTSYWIGWVRQMPGKGLEWMGIIYPGDSDTRYSPSFQGQVTISADKSISTAYLQWSSLKASDTAMYYCARFPYDSSGYYSFDYWGQGTLVTVSSASTKGPSVFPLAPSSKSTSGGTAALGCLVKDYFPEPVTVSWNSGALTSGVHTFPAVLQSSGLYSLSSVVTVPSSSLGTQTYICNVNHKPSNTKVDKKVEPKSCDKTHT

SEQ ID NO: 778 - DNA, 21 bp, Artificial Sequence
  Synthetic
caggtgacagttcaggtgcag

SEQ ID NO: 779 - DNA, 21 bp, Artificial Sequence
  Synthetic
tccaccctgactccaggtgac

SEQ ID NO: 780 - DNA, 22 bp, Artificial Sequence
  Synthetic
gagaaggaaataagacccagtt

SEQ ID NO: 781 - DNA, 22 bp, Artificial Sequence
  Synthetic
ccttctctctgcctctcagctt

SEQ ID NO: 782 - DNA, 19 bp, Artificial Sequence
  Synthetic
ccaccctctgtctgtctcc

SEQ ID NO: 783 - DNA, 23 bp, Artificial Sequence
  Synthetic
tccgctgggtggtgggaaaagaa

SEQ ID NO: 784 - DNA, 21 bp, Artificial Sequence
  Synthetic
atgggctccgctgggtggtgg

SEQ ID NO: 785 - DNA, 18 bp, Artificial Sequence
  Synthetic
acgatgggctccgctggg

SEQ ID NO: 786 - DNA, 20 bp, Artificial Sequence
  Synthetic
ccatccttgggcagagacct

SEQ ID NO: 787 - DNA, 21 bp, Artificial Sequence
  Synthetic
atgaccaggtactgagaaggg

SEQ ID NO: 788 - DNA, 21 bp, Artificial Sequence
  Synthetic
aggtactgagaagggttcgtc

SEQ ID NO: 789 - DNA, 22 bp, Artificial Sequence
  Synthetic
tagggacctgcggagagggcga

SEQ ID NO: 790 - DNA, 21 bp, Artificial Sequence
  Synthetic
gcctagggacctgcgggagag

SEQ ID NO: 791 - DNA, 22 bp, Artificial Sequence
  Synthetic
gccttttattcgcgagggtcgg

SEQ ID NO: 792 - DNA, 23 bp, Artificial Sequence
  Synthetic
tggagggccttttattcgcgagg

SEQ ID NO: 793 - DNA, 22 bp, Artificial Sequence
  Synthetic
taggcactcacccactgcaaga

SEQ ID NO: 794 - DNA, 21 bp, Artificial Sequence
  Synthetic
cggagctcaccaggtagttct

SEQ ID NO: 795 - DNA, 21 bp, Artificial Sequence
  Synthetic
agggcagtgcttacctgaggg

SEQ ID NO: 796 - DNA, 16 bp, Homo sapiens
acaataaataccgagg

SEQ ID NO: 797 - DNA, 20 bp, Homo sapiens
gcgcaccttcccgaatgtcc

SEQ ID NO: 798 - DNA, 16 bp, Homo sapiens
cccgaatgtccgacag

SEQ ID NO: 799 - DNA, 17 bp, Homo sapiens
cggagcggttgtgaact

SEQ ID NO: 800 - DNA, 17 bp, Homo sapiens
acaataaataccgagga

SEQ ID NO: 801 - DNA, 16 bp, Homo sapiens
gacaatctccgccagg

SEQ ID NO: 802 - DNA, 16 bp, Homo sapiens
tcccgaatgtccgaca

SEQ ID NO: 803 - DNA, 16 bp, Homo sapiens
tgtaatgttgtccagt

SEQ ID NO: 804 - DNA, 16 bp, Homo sapiens
gtgtaatgttgtccag

SEQ ID NO: 805 - DNA, 20 bp, Homo sapiens
cgacacctcgcccctcttca

SEQ ID NO: 806 - DNA, 20 bp, Homo sapiens
acgacacctcgcccctcttc

SEQ ID NO: 807 - DNA, 20 bp, Homo sapiens
cacgacacctcgcccctctt

SEQ ID NO: 808 - DNA, 20 bp, Homo sapiens
gcacgacacctcgcccctct

SEQ ID NO: 809 - DNA, 20 bp, Homo sapiens
agcacgacacctcgcccctc

SEQ ID NO: 810 - DNA, 20 bp, Homo sapiens
aagcacgacacctcgcccct

SEQ ID NO: 811 - DNA, 20 bp, Homo sapiens
gaagcacgacacctcgcccc

SEQ ID NO: 812 - DNA, 20 bp, Homo sapiens
ggaagcacgacacctcgccc

SEQ ID NO: 813 - DNA, 20 bp, Homo sapiens
cggaagcacgacacctcgcc

SEQ ID NO: 814 - DNA, 20 bp, Homo sapiens
acggaagcacgacacctcgc

SEQ ID NO: 815 - DNA, 20 bp, Homo sapiens
cacggaagcacgacacctcg

SEQ ID NO: 816 - DNA, 20 bp, Homo sapiens
tcacggaagcacgacacctc

SEQ ID NO: 817 - DNA, 20 bp, Homo sapiens
ctcacggaagcacgacacct

SEQ ID NO: 818 - DNA, 20 bp, Homo sapiens
cctcacggaagcacgacacc

SEQ ID NO: 819 - DNA, 20 bp, Homo sapiens
tcctcacggaagcacgacac

SEQ ID NO: 820 - DNA, 20 bp, Homo sapiens
ctcctcacggaagcacgaca

SEQ ID NO: 821 - DNA, 20 bp, Homo sapiens
tctcctcacggaagcacgac

SEQ ID NO: 822 - DNA, 20 bp, Homo sapiens
ctctcctcacggaagcacga

SEQ ID NO: 823 - DNA, 20 bp, Homo sapiens
cctctcctcacggaagcacg

SEQ ID NO: 824 - DNA, 20 bp, Homo sapiens
ccctctcctcacggaagcac

SEQ ID NO: 825 - DNA, 20 bp, Homo sapiens
tccctctcctcacggaagca

SEQ ID NO: 826 - DNA, 20 bp, Homo sapiens
gtccctctcctcacggaagc

SEQ ID NO: 827 - DNA, 20 bp, Homo sapiens
cgtccctctcctcacggaag

SEQ ID NO: 828 - DNA, 20 bp, Homo sapiens
ggtccccattcaccaacacg

SEQ ID NO: 829 - DNA, 20 bp, Homo sapiens
cggtccccattcaccaacac

SEQ ID NO: 830 - DNA, 20 bp, Homo sapiens
ccggtccccattcaccaaca

SEQ ID NO: 831 - DNA, 20 bp, Homo sapiens
gccggtccccattcaccaac

SEQ ID NO: 832 - DNA, 20 bp, Homo sapiens
cgccggtccccattcaccaa

SEQ ID NO: 833 - DNA, 20 bp, Homo sapiens
ccgccggtccccattcacca

SEQ ID NO: 834 - DNA, 20 bp, Homo sapiens
accgccggtccccattcacc

SEQ ID NO: 835 - DNA, 20 bp, Homo sapiens
caccgccggtccccattcac

SEQ ID NO: 836 - DNA, 20 bp, Homo sapiens
ccaccgccggtccccattca

SEQ ID NO: 837 - DNA, 20 bp, Homo sapiens
tccaccgccggtccccattc

SEQ ID NO: 838 - DNA, 20 bp, Homo sapiens
atccaccgccggtccccatt

SEQ ID NO: 839 - DNA, 20 bp, Homo sapiens
gatccaccgccggtccccat

SEQ ID NO: 840 - DNA, 20 bp, Homo sapiens
tgatccaccgccggtcccca

SEQ ID NO: 841 - DNA, 20 bp, Homo sapiens
gtgatccaccgccggtcccc

SEQ ID NO: 842 - DNA, 20 bp, Homo sapiens
cgtgatccaccgccggtccc

SEQ ID NO: 843 - DNA, 20 bp, Homo sapiens
ttctcatcctggaaggcgaa

SEQ ID NO: 844 - DNA, 20 bp, Homo sapiens
gttctcatcctggaaggcga

SEQ ID NO: 845 - DNA, 20 bp, Homo sapiens
agttctcatcctggaaggcg

SEQ ID NO: 846 - DNA, 20 bp, Homo sapiens
gtagttctcatcctggaagg

SEQ ID NO: 847 - DNA, 20 bp, Homo sapiens
ggtagttctcatcctggaag

SEQ ID NO: 848 - DNA, 20 bp, Homo sapiens
aggtagttctcatcctggaa

SEQ ID NO: 849 - DNA, 20 bp, Homo sapiens
caggtagttctcatcctgga

SEQ ID NO: 850 - DNA, 20 bp, Homo sapiens
tacaggtagttctcatcctg

SEQ ID NO: 851 - DNA, 20 bp, Homo sapiens
gtacaggtagttctcatcct

SEQ ID NO: 852 - DNA, 20 bp, Homo sapiens
ggtacaggtagttctcatcc

SEQ ID NO: 853 - DNA, 20 bp, Homo sapiens
aggtacaggtagttctcatc

SEQ ID NO: 854 - DNA, 20 bp, Homo sapiens
ccaggtacaggtagttctca

SEQ ID NO: 855 - DNA, 20 bp, Homo sapiens
accaggtacaggtagttctc

SEQ ID NO: 856 - DNA, 20 bp, Homo sapiens
gaccaggtacaggtagttct

SEQ ID NO: 857 - DNA, 20 bp, Homo sapiens
tgaccaggtacaggtagttc

SEQ ID NO: 858 - DNA, 20 bp, Homo sapiens
catgaccaggtacaggtagt

SEQ ID NO: 859 - DNA, 20 bp, Homo sapiens
ccatgaccaggtacaggtag

SEQ ID NO: 860 - DNA, 20 bp, Homo sapiens
tccatgaccaggtacaggta

SEQ ID NO: 861 - DNA, 20 bp, Homo sapiens
ctccatgaccaggtacaggt

SEQ ID NO: 862 - DNA, 20 bp, Homo sapiens
actccatgaccaggtacagg

SEQ ID NO: 863 - DNA, 20 bp, Homo sapiens
tactccatgaccaggtacag

SEQ ID NO: 864 - DNA, 20 bp, Homo sapiens
atactccatgaccaggtaca

SEQ ID NO: 865 - DNA, 20 bp, Homo sapiens
aatactccatgaccaggtac

SEQ ID NO: 866 - DNA, 20 bp, Homo sapiens
taatactccatgaccaggta

SEQ ID NO: 867 - DNA, 20 bp, Homo sapiens
cgtaatactccatgaccagg

SEQ ID NO: 868 - DNA, 20 bp, Homo sapiens
agcagtgtcagcaggtcccc

SEQ ID NO: 869 - DNA, 20 bp, Homo sapiens
cagcagtgtcagcaggtccc

SEQ ID NO: 870 - DNA, 20 bp, Homo sapiens
tcagcagtgtcagcaggtcc

SEQ ID NO: 871 - DNA, 20 bp, Homo sapiens
ctcagcagtgtcagcaggtc

SEQ ID NO: 872 - DNA, 20 bp, Homo sapiens
gctcagcagtgtcagcaggt

SEQ ID NO: 873 - DNA, 20 bp, Homo sapiens
tgctcagcagtgtcagcagg

SEQ ID NO: 874 - DNA, 20 bp, Homo sapiens
ttgctcagcagtgtcagcag

SEQ ID NO: 875 - DNA, 20 bp, Homo sapiens
cttgctcagcagtgtcagca

SEQ ID NO: 876 - DNA, 20 bp, Homo sapiens
acttgctcagcagtgtcagc

SEQ ID NO: 877 - DNA, 20 bp, Homo sapiens
aacttgctcagcagtgtcag

SEQ ID NO: 878 - DNA, 20 bp, Homo sapiens
aaacttgctcagcagtgtca

SEQ ID NO: 879 - DNA, 20 bp, Homo sapiens
caaacttgctcagcagtgtc

SEQ ID NO: 880 - DNA, 20 bp, Homo sapiens
ccaaacttgctcagcagtgt

SEQ ID NO: 881 - DNA, 20 bp, Homo sapiens
cccaaacttgctcagcagtg

SEQ ID NO: 882 - DNA, 20 bp, Homo sapiens
gtgagcccgtcctccaccaa

SEQ ID NO: 883 - DNA, 20 bp, Homo sapiens
agtgagcccgtcctccacca

SEQ ID NO: 884 - DNA, 20 bp, Homo sapiens
cagtgagcccgtcctccacc

SEQ ID NO: 885 - DNA, 20 bp, Homo sapiens
gcagtgagcccgtcctccac

SEQ ID NO: 886 - DNA, 20 bp, Homo sapiens
ggcagtgagcccgtcctcca

SEQ ID NO: 887 - DNA, 20 bp, Homo sapiens
tggcagtgagcccgtcctcc

SEQ ID NO: 888 - DNA, 20 bp, Homo sapiens
catggcagtgagcccgtcct

SEQ ID NO: 889 - DNA, 20 bp, Homo sapiens
ccatggcagtgagcccgtcc

SEQ ID NO: 890 - DNA, 20 bp, Homo sapiens
tccatggcagtgagcccgtc

SEQ ID NO: 891 - DNA, 20 bp, Homo sapiens
ctccatggcagtgagcccgt

SEQ ID NO: 892 - DNA, 20 bp, Homo sapiens
tctccatggcagtgagcccg

SEQ ID NO: 893 - DNA, 20 bp, Homo sapiens
gtctccatggcagtgagccc

SEQ ID NO: 894 - DNA, 20 bp, Homo sapiens
ccttcccgaatgtccgacag

SEQ ID NO: 895 - DNA, 20 bp, Homo sapiens
accttcccgaatgtccgaca

SEQ ID NO: 896 - DNA, 20 bp, Homo sapiens
caccttcccgaatgtccgac

SEQ ID NO: 897 - DNA, 20 bp, Homo sapiens
gcaccttcccgaatgtccga

SEQ ID NO: 898 - DNA, 20 bp, Homo sapiens
cgcaccttcccgaatgtccg

SEQ ID NO: 899 - DNA, 20 bp, Homo sapiens
ggcgcaccttcccgaatgtc

SEQ ID NO: 900 - DNA, 20 bp, Homo sapiens
acaaaaggcaggtggacccc

SEQ ID NO: 901 - DNA, 20 bp, Homo sapiens
cacaaaaggcaggtggaccc

SEQ ID NO: 902 - DNA, 20 bp, Homo sapiens
ccacaaaaggcaggtggacc

SEQ ID NO: 903 - DNA, 20 bp, Homo sapiens
cccacaaaaggcaggtggac

SEQ ID NO: 904 - DNA, 20 bp, Homo sapiens
gcccacaaaaggcaggtgga

SEQ ID NO: 905 - DNA, 20 bp, Homo sapiens
agcccacaaaaggcaggtgg

SEQ ID NO: 906 - DNA, 20 bp, Homo sapiens
tagcccacaaaaggcaggtg

SEQ ID NO: 907 - DNA, 20 bp, Homo sapiens
gtagcccacaaaaggcaggt

SEQ ID NO: 908 - DNA, 20 bp, Homo sapiens
agtagcccacaaaaggcagg

SEQ ID NO: 909 - DNA, 20 bp, Homo sapiens
gagtagcccacaaaaggcag

SEQ ID NO: 910 - DNA, 20 bp, Homo sapiens
ggagtagcccacaaaaggca

SEQ ID NO: 911 - DNA, 20 bp, Homo sapiens
aggagtagcccacaaaaggc

SEQ ID NO: 912 - DNA, 20 bp, Homo sapiens
taggagtagcccacaaaagg

SEQ ID NO: 913 - DNA, 20 bp, Homo sapiens
gtaggagtagcccacaaaag

SEQ ID NO: 914 - DNA, 20 bp, Homo sapiens
agtaggagtagcccacaaaa

SEQ ID NO: 915 - DNA, 20 bp, Homo sapiens
gagtaggagtagcccacaaa

SEQ ID NO: 916 - DNA, 20 bp, Homo sapiens
ggagtaggagtagcccacaa

SEQ ID NO: 917 - DNA, 20 bp, Homo sapiens
aggagtaggagtagcccaca

SEQ ID NO: 918 - DNA, 20 bp, Homo sapiens
caggagtaggagtagcccac

SEQ ID NO: 919 - DNA, 20 bp, Homo sapiens
gcaggagtaggagtagccca

SEQ ID NO: 920 - DNA, 20 bp, Homo sapiens
tgcaggagtaggagtagccc

SEQ ID NO: 921 - DNA, 20 bp, Homo sapiens
atgcaggagtaggagtagcc

SEQ ID NO: 922 - DNA, 20 bp, Homo sapiens
catgcaggagtaggagtagc

SEQ ID NO: 923 - DNA, 20 bp, Homo sapiens
ccatgcaggagtaggagtag

SEQ ID NO: 924 - DNA, 20 bp, Homo sapiens
gccatgcaggagtaggagta

SEQ ID NO: 925 - DNA, 20 bp, Homo sapiens
ggccatgcaggagtaggagt

SEQ ID NO: 926 - DNA, 20 bp, Homo sapiens
gggccatgcaggagtaggag

SEQ ID NO: 927 - DNA, 20 bp, Homo sapiens
agggccatgcaggagtagga

SEQ ID NO: 928 - DNA, 20 bp, Homo sapiens
gagggccatgcaggagtagg

SEQ ID NO: 929 - DNA, 20 bp, Homo sapiens
ctgagggccatgcaggagta

SEQ ID NO: 930 - DNA, 20 bp, Homo sapiens
cctgagggccatgcaggagt

SEQ ID NO: 931 - DNA, 20 bp, Homo sapiens
ccctgagggccatgcaggag

SEQ ID NO: 932 - DNA, 20 bp, Homo sapiens
tccctgagggccatgcagga

SEQ ID NO: 933 - DNA, 20 bp, Homo sapiens
gtccctgagggccatgcagg

SEQ ID NO: 934 - DNA, 20 bp, Homo sapiens
tgtccctgagggccatgcag

SEQ ID NO: 935 - DNA, 20 bp, Homo sapiens
ctgtccctgagggccatgca

SEQ ID NO: 936 - DNA, 20 bp, Homo sapiens
actgtccctgagggccatgc

SEQ ID NO: 937 - DNA, 20 bp, Homo sapiens
cactgtccctgagggccatg

SEQ ID NO: 938 - DNA, 20 bp, Homo sapiens
tcactgtccctgagggccat

SEQ ID NO: 939 - DNA, 20 bp, Homo sapiens
ctcactgtccctgagggcca

SEQ ID NO: 940 - DNA, 20 bp, Homo sapiens
cctcactgtccctgagggcc

SEQ ID NO: 941 - DNA, 20 bp, Homo sapiens
acctcactgtccctgagggc

SEQ ID NO: 942 - DNA, 20 bp, Homo sapiens
gacctcactgtccctgaggg

SEQ ID NO: 943 - DNA, 20 bp, Homo sapiens
ggacctcactgtccctgagg

SEQ ID NO: 944 - DNA, 20 bp, Homo sapiens
gggacctcactgtccctgag

SEQ ID NO: 945 - DNA, 20 bp, Homo sapiens
cctccagttccatgggtgtg

SEQ ID NO: 946 - DNA, 20 bp, Homo sapiens
gcctccagttccatgggtgt

SEQ ID NO: 947 - DNA, 20 bp, Homo sapiens
ggcctccagttccatgggtg

SEQ ID NO: 948 - DNA, 20 bp, Homo sapiens
cggcctccagttccatgggt

SEQ ID NO: 949 - DNA, 20 bp, Homo sapiens
tcggcctccagttccatggg

SEQ ID NO: 950 - DNA, 20 bp, Homo sapiens
ctcggcctccagttccatgg

SEQ ID NO: 951 - DNA, 20 bp, Homo sapiens
gctcggcctccagttccatg

SEQ ID NO: 952 - DNA, 20 bp, Homo sapiens
tgctcggcctccagttccat

SEQ ID NO: 953 - DNA, 20 bp, Homo sapiens
ctgctcggcctccagttcca

SEQ ID NO: 954 - DNA, 20 bp, Homo sapiens
gctgctcggcctccagttcc

SEQ ID NO: 955 - DNA, 20 bp, Homo sapiens
agctgctcggcctccagttc

SEQ ID NO: 956 - DNA, 20 bp, Homo sapiens
cagctgctcggcctccagtt

SEQ ID NO: 957 - DNA, 20 bp, Homo sapiens
gcagctgctcggcctccagt

SEQ ID NO: 958 - DNA, 20 bp, Homo sapiens
agcagctgctcggcctccag

SEQ ID NO: 959 - DNA, 20 bp, Homo sapiens
aagcagctgctcggcctcca

SEQ ID NO: 960 - DNA, 20 bp, Homo sapiens
caagcagctgctcggcctcc

SEQ ID NO: 961 - DNA, 20 bp, Homo sapiens
tcaagcagctgctcggcctc

SEQ ID NO: 962 - DNA, 20 bp, Homo sapiens
ctcaagcagctgctcggcct

SEQ ID NO: 963 - DNA, 20 bp, Homo sapiens
gctcaagcagctgctcggcc

SEQ ID NO: 964 - DNA, 20 bp, Homo sapiens
ggctcaagcagctgctcggc

SEQ ID NO: 965 - DNA, 20 bp, Homo sapiens
tggctcaagcagctgctcgg

SEQ ID NO: 966 - DNA, 20 bp, Homo sapiens
gtggctcaagcagctgctcg

SEQ ID NO: 967 - DNA, 20 bp, Homo sapiens
tgtggctcaagcagctgctc

SEQ ID NO: 968 - DNA, 20 bp, Homo sapiens
gtgtggctcaagcagctgct

SEQ ID NO: 969 - DNA, 20 bp, Homo sapiens
ccacttcagctgtttcatcc

SEQ ID NO: 970 - DNA, 20 bp, Homo sapiens
tgccacttcagctgtttcat

SEQ ID NO: 971 - DNA, 20 bp, Homo sapiens
ctgccacttcagctgtttca

SEQ ID NO: 972 - DNA, 20 bp, Homo sapiens
actgccacttcagctgtttc

SEQ ID NO: 973 - DNA, 20 bp, Homo sapiens
aactgccacttcagctgttt

SEQ ID NO: 974 - DNA, 20 bp, Homo sapiens
gaactgccacttcagctgtt

SEQ ID NO: 975 - DNA, 20 bp, Homo sapiens
ggaactgccacttcagctgt

SEQ ID NO: 976 - DNA, 20 bp, Homo sapiens
tggaactgccacttcagctg

SEQ ID NO: 977 - DNA, 20 bp, Homo sapiens
ctggaactgccacttcagct

SEQ ID NO: 978 - DNA, 20 bp, Homo sapiens
gctggaactgccacttcagc

SEQ ID NO: 979 - DNA, 20 bp, Homo sapiens
cgctggaactgccacttcag

SEQ ID NO: 980 - DNA, 20 bp, Homo sapiens
ccgctggaactgccacttca

SEQ ID NO: 981 - DNA, 20 bp, Homo sapiens
gccgctggaactgccacttc

SEQ ID NO: 982 - DNA, 20 bp, Homo sapiens
agccgctggaactgccactt

SEQ ID NO: 983 - DNA, 20 bp, Homo sapiens
ctcagcctctgccgcaggga

SEQ ID NO: 984 - DNA, 20 bp, Homo sapiens
cctcagcctctgccgcaggg

SEQ ID NO: 985 - DNA, 20 bp, Homo sapiens
ggcctcagcctctgccgcag

SEQ ID NO: 986 - DNA, 20 bp, Homo sapiens
cggcctcagcctctgccgca

SEQ ID NO: 987 - DNA, 20 bp, Homo sapiens
tcggcctcagcctctgccgc

SEQ ID NO: 988 - DNA, 20 bp, Homo sapiens
ctcggcctcagcctctgccg

SEQ ID NO: 989 - DNA, 20 bp, Homo sapiens
cctcggcctcagcctctgcc

SEQ ID NO: 990 - DNA, 20 bp, Homo sapiens
acctcggcctcagcctctgc

SEQ ID NO: 991 - DNA, 20 bp, Homo sapiens
cacctcggcctcagcctctg

SEQ ID NO: 992 - DNA, 20 bp, Homo sapiens
tcacctcggcctcagcctct

SEQ ID NO: 993 - DNA, 20 bp, Homo sapiens
gtcacctcggcctcagcctc

SEQ ID NO: 994 - DNA, 20 bp, Homo sapiens
cgtcacctcggcctcagcct

SEQ ID NO: 995 - DNA, 20 bp, Homo sapiens
agcacctcctcctccagggc

SEQ ID NO: 996 - DNA, 20 bp, Homo sapiens
gagcacctcctcctccaggg

SEQ ID NO: 997 - DNA, 20 bp, Homo sapiens
tgagcacctcctcctccagg

SEQ ID NO: 998 - DNA, 20 bp, Homo sapiens
gtgagcacctcctcctccag

SEQ ID NO: 999 - DNA, 20 bp, Homo sapiens
ggtgagcacctcctcctcca

SEQ ID NO: 1000 - DNA, 20 bp, Homo sapiens
gggtgagcacctcctcctcc

SEQ ID NO: 1001 - DNA, 20 bp, Homo sapiens
cgggtgagcacctcctcctc

SEQ ID NO: 1002 - DNA, 20 bp, Homo sapiens
ccgggtgagcacctcctcct

SEQ ID NO: 1003 - DNA, 20 bp, Homo sapiens
gccgggtgagcacctcctcc

SEQ ID NO: 1004 - DNA, 20 bp, Homo sapiens
tgccgggtgagcacctcctc

SEQ ID NO: 1005 - DNA, 20 bp, Homo sapiens
ctgccgggtgagcacctcct

SEQ ID NO: 1006 - DNA, 20 bp, Homo sapiens
tctgccgggtgagcacctcc

SEQ ID NO: 1007 - DNA, 20 bp, Homo sapiens
gctctgccgggtgagcacct

SEQ ID NO: 1008 - DNA, 20 bp, Homo sapiens
ggctctgccgggtgagcacc

SEQ ID NO: 1009 - DNA, 20 bp, Homo sapiens
aggctctgccgggtgagcac

SEQ ID NO: 1010 - DNA, 20 bp, Homo sapiens
caggctctgccgggtgagca

SEQ ID NO: 1011 - DNA, 20 bp, Homo sapiens
tcaggctctgccgggtgagc

SEQ ID NO: 1012 - DNA, 20 bp, Homo sapiens
gctcaggctctgccgggtga

SEQ ID NO: 1013 - DNA, 20 bp, Homo sapiens
cggctcaggctctgccgggt

SEQ ID NO: 1014 - DNA, 20 bp, Homo sapiens
ccggctcaggctctgccggg

SEQ ID NO: 1015 - DNA, 20 bp, Homo sapiens
cccggctcaggctctgccgg

SEQ ID NO: 1016 - DNA, 20 bp, Homo sapiens
tcccggctcaggctctgccg

SEQ ID NO: 1017 - DNA, 20 bp, Homo sapiens
ctcccggctcaggctctgcc

SEQ ID NO: 1018 - DNA, 20 bp, Homo sapiens
tctcccggctcaggctctgc

SEQ ID NO: 1019 - DNA, 20 bp, Homo sapiens
atctcccggctcaggctctg

SEQ ID NO: 1020 - DNA, 20 bp, Homo sapiens
catctcccggctcaggctct

SEQ ID NO: 1021 - DNA, 20 bp, Homo sapiens
ccatctcccggctcaggctc

SEQ ID NO: 1022 - DNA, 20 bp, Homo sapiens
tccatctcccggctcaggct

SEQ ID NO: 1023 - DNA, 20 bp, Homo sapiens
ctccatctcccggctcaggc

SEQ ID NO: 1024 - DNA, 20 bp, Homo sapiens
cctccatctcccggctcagg

SEQ ID NO: 1025 - DNA, 20 bp, Homo sapiens
gcctccatctcccggctcag

SEQ ID NO: 1026 - DNA, 20 bp, Homo sapiens
ggcctccatctcccggctca

SEQ ID NO: 1027 - DNA, 20 bp, Homo sapiens
tggcctccatctcccggctc

SEQ ID NO: 1028 - DNA, 20 bp, Homo sapiens
atggcctccatctcccggct

SEQ ID NO: 1029 - DNA, 20 bp, Homo sapiens
gatggcctccatctcccggc

SEQ ID NO: 1030 - DNA, 20 bp, Homo sapiens
ggatggcctccatctcccgg

SEQ ID NO: 1031 - DNA, 20 bp, Homo sapiens
cggatggcctccatctcccg

SEQ ID NO: 1032 - DNA, 20 bp, Homo sapiens
gcggatggcctccatctccc

SEQ ID NO: 1033 - DNA, 20 bp, Homo sapiens
tgcggatggcctccatctcc

SEQ ID NO: 1034 - DNA, 20 bp, Homo sapiens
gttccgagcctctgcctcgc

SEQ ID NO: 1035 - DNA, 20 bp, Homo sapiens
agggcctcagcctggccgaa

SEQ ID NO: 1036 - DNA, 20 bp, Homo sapiens
cagggcctcagcctggccga

SEQ ID NO: 1037 - DNA, 20 bp, Homo sapiens
gtcagggcctcagcctggcc

SEQ ID NO: 1038 - DNA, 20 bp, Homo sapiens
cgtcagggcctcagcctggc

SEQ ID NO: 1039 - DNA, 20 bp, Homo sapiens
agcaaatttcccgagtaagc

SEQ ID NO: 1040 - DNA, 20 bp, Homo sapiens
aagcaaatttcccgagtaag

SEQ ID NO: 1041 - DNA, 20 bp, Homo sapiens
aaaagcaaatttcccgagta

SEQ ID NO: 1042 - DNA, 20 bp, Homo sapiens
caaaagcaaatttcccgagt

SEQ ID NO: 1043 - DNA, 20 bp, Homo sapiens
gcaaaagcaaatttcccgag

SEQ ID NO: 1044 - DNA, 20 bp, Homo sapiens
ggcaaaagcaaatttcccga

SEQ ID NO: 1045 - DNA, 20 bp, Homo sapiens
tggcaaaagcaaatttcccg

SEQ ID NO: 1046 - DNA, 20 bp, Homo sapiens
tttggcaaaagcaaatttcc

SEQ ID NO: 1047 - DNA, 20 bp, Homo sapiens
gtttggcaaaagcaaatttc

SEQ ID NO: 1048 - DNA, 20 bp, Homo sapiens
gggtttggcaaaagcaaatt

SEQ ID NO: 1049 - DNA, 20 bp, Homo sapiens
cgggtttggcaaaagcaaat

SEQ ID NO: 1050 - DNA, 20 bp, Homo sapiens
aagcgggtttggcaaaagca

SEQ ID NO: 1051 - DNA, 20 bp, Homo sapiens
aatatccaaaccgccgaagc

SEQ ID NO: 1052 - DNA, 20 bp, Homo sapiens
aaatatccaaaccgccgaag

SEQ ID NO: 1053 - DNA, 20 bp, Homo sapiens
ataaatatccaaaccgccga

SEQ ID NO: 1054 - DNA, 20 bp, Homo sapiens
aataaatatccaaaccgccg

SEQ ID NO: 1055 - DNA, 20 bp, Homo sapiens
tcaataaatatccaaaccgc

SEQ ID NO: 1056 - DNA, 20 bp, Homo sapiens
gtcaataaatatccaaaccg

SEQ ID NO: 1057 - DNA, 20 bp, Homo sapiens
ggtcaataaatatccaaacc

SEQ ID NO: 1058 - DNA, 20 bp, Homo sapiens
aggtcaataaatatccaaac

SEQ ID NO: 1059 - DNA, 20 bp, Homo sapiens
gaggtcaataaatatccaaa

SEQ ID NO: 1060 - DNA, 20 bp, Homo sapiens
acgaggtcaataaatatcca

SEQ ID NO: 1061 - DNA, 20 bp, Homo sapiens
gacgaggtcaataaatatcc

SEQ ID NO: 1062 - DNA, 20 bp, Homo sapiens
aggacgaggtcaataaatat

SEQ ID NO: 1063 - DNA, 20 bp, Homo sapiens
gaggacgaggtcaataaata

SEQ ID NO: 1064 - DNA, 20 bp, Homo sapiens
cggaggacgaggtcaataaa

SEQ ID NO: 1065 - DNA, 20 bp, Homo sapiens
tcggaggacgaggtcaataa

SEQ ID NO: 1066 - DNA, 20 bp, Homo sapiens
agtcggaggacgaggtcaat

SEQ ID NO: 1067 - DNA, 20 bp, Homo sapiens
gagtcggaggacgaggtcaa

SEQ ID NO: 1068 - DNA, 20 bp, Homo sapiens
gcgagtcggaggacgaggtc

SEQ ID NO: 1069 - DNA, 20 bp, Homo sapiens
agcgagtcggaggacgaggt

SEQ ID NO: 1070 - DNA, 20 bp, Homo sapiens
cagcgagtcggaggacgagg

SEQ ID NO: 1071 - DNA, 20 bp, Homo sapiens
tcagcgagtcggaggacgag

SEQ ID NO: 1072 - DNA, 20 bp, Homo sapiens
gtcagcgagtcggaggacga

SEQ ID NO: 1073 - DNA, 20 bp, Homo sapiens
ctgtcagcgagtcggaggac

SEQ ID NO: 1074 - DNA, 20 bp, Homo sapiens
cctgtcagcgagtcggagga

SEQ ID NO: 1075 - DNA, 20 bp, Homo sapiens
agcctgtcagcgagtcggag

SEQ ID NO: 1076 - DNA, 20 bp, Homo sapiens
gtctcagtgcatccaaaacg

SEQ ID NO: 1077 - DNA, 20 bp, Homo sapiens
ggtctcagtgcatccaaaac

SEQ ID NO: 1078 - DNA, 20 bp, Homo sapiens
gggtctcagtgcatccaaaa

SEQ ID NO: 1079 - DNA, 20 bp, Homo sapiens
ggagggccttttattcgcga

SEQ ID NO: 1080 - DNA, 20 bp, Homo sapiens
tggagggccttttattcgcg

SEQ ID NO: 1081 - DNA, 20 bp, Homo sapiens
atggagggccttttattcgc

SEQ ID NO: 1082 - DNA, 20 bp, Homo sapiens
gatggagggccttttattcg

SEQ ID NO: 1083 - DNA, 20 bp, Homo sapiens
agatggagggccttttattc

SEQ ID NO: 1084 - DNA, 20 bp, Homo sapiens
cagatggagggccttttatt

SEQ ID NO: 1085 - DNA, 20 bp, Homo sapiens
gcagatggagggccttttat

SEQ ID NO: 1086 - DNA, 16 bp, Homo sapiens
tctcctcacggaagca

SEQ ID NO: 1087 - DNA, 16 bp, Homo sapiens
ctctcctcacggaagc

SEQ ID NO: 1088 - DNA, 16 bp, Homo sapiens
cctctcctcacggaag

SEQ ID NO: 1089 - DNA, 16 bp, Homo sapiens
aaacttgctcagcagt

SEQ ID NO: 1090 - DNA, 16 bp, Homo sapiens
caaacttgctcagcag

SEQ ID NO: 1091 - DNA, 16 bp, Homo sapiens
ccaaacttgctcagca

SEQ ID NO: 1092 - DNA, 16 bp, Homo sapiens
cccaaacttgctcagc

SEQ ID NO: 1093 - DNA, 16 bp, Homo sapiens
ccccaaacttgctcag

SEQ ID NO: 1094 - DNA, 16 bp, Homo sapiens
tccccaaacttgctca

SEQ ID NO: 1095 - DNA, 16 bp, Homo sapiens
gtttgatgtccctgtg

SEQ ID NO: 1096 - DNA, 16 bp, Homo sapiens
ggtttgatgtccctgt

SEQ ID NO: 1097 - DNA, 16 bp, Homo sapiens
gggtttgatgtccctg

SEQ ID NO: 1098 - DNA, 16 bp, Homo sapiens
acagcctgcaggatct

SEQ ID NO: 1099 - DNA, 16 bp, Homo sapiens
cacagcctgcaggatc

SEQ ID NO: 1100 - DNA, 16 bp, Homo sapiens
ccacagcctgcaggat

SEQ ID NO: 1101 - DNA, 16 bp, Homo sapiens
cccacagcctgcagga

SEQ ID NO: 1102 - DNA, 16 bp, Homo sapiens
gcccacagcctgcagg

SEQ ID NO: 1103 - DNA, 16 bp, Homo sapiens
cgcccacagcctgcag

SEQ ID NO: 1104 - DNA, 16 bp, Homo sapiens
ccgcccacagcctgca

SEQ ID NO: 1105 - DNA, 16 bp, Homo sapiens
accgcccacagcctgc

SEQ ID NO: 1106 - DNA, 16 bp, Homo sapiens
caccgcccacagcctg

SEQ ID NO: 1107 - DNA, 16 bp, Homo sapiens
ccaccgcccacagcct

SEQ ID NO: 1108 - DNA, 16 bp, Homo sapiens
cccaccgcccacagcc

SEQ ID NO: 1109 - DNA, 16 bp, Homo sapiens
gcccaccgcccacagc

SEQ ID NO: 1110 - DNA, 16 bp, Homo sapiens
ccaggcccaccgccca

SEQ ID NO: 1111 - DNA, 16 bp, Homo sapiens
cccaggcccaccgccc

SEQ ID NO: 1112 - DNA, 16 bp, Homo sapiens
tcccaggcccaccgcc

SEQ ID NO: 1113 - DNA, 16 bp, Homo sapiens
tgcctgtcccaggccc

SEQ ID NO: 1114 - DNA, 16 bp, Homo sapiens
ctgcctgtcccaggcc

SEQ ID NO: 1115 - DNA, 16 bp, Homo sapiens
gctgcctgtcccaggc

SEQ ID NO: 1116 - DNA, 16 bp, Homo sapiens
ggtggcaccttcgaaa

SEQ ID NO: 1117 - DNA, 16 bp, Homo sapiens
cggtggcaccttcgaa

SEQ ID NO: 1118 - DNA, 16 bp, Homo sapiens
tcggtggcaccttcga

SEQ ID NO: 1119 - DNA, 16 bp, Homo sapiens
agtgagcccgtcctcc

SEQ ID NO: 1120 - DNA, 16 bp, Homo sapiens
cagtgagcccgtcctc

SEQ ID NO: 1121 - DNA, 16 bp, Homo sapiens
gcagtgagcccgtcct

SEQ ID NO: 1122 - DNA, 16 bp, Homo sapiens
ttcccgaatgtccgac

SEQ ID NO: 1123 - DNA, 16 bp, Homo sapiens
cttcccgaatgtccga

SEQ ID NO: 1124 - DNA, 16 bp, Homo sapiens
ccttcccgaatgtccg

SEQ ID NO: 1125 - DNA, 16 bp, Homo sapiens
accttcccgaatgtcc

SEQ ID NO: 1126 - DNA, 16 bp, Homo sapiens
caccttcccgaatgtc

SEQ ID NO: 1127 - DNA, 16 bp, Homo sapiens
gcaccttcccgaatgt

SEQ ID NO: 1128 - DNA, 16 bp, Homo sapiens
cgcaccttcccgaatg

SEQ ID NO: 1129 - DNA, 16 bp, Homo sapiens
atccgctcctgcaact

SEQ ID NO: 1130 - DNA, 16 bp, Homo sapiens
catccgctcctgcaac

SEQ ID NO: 1131 - DNA, 16 bp, Homo sapiens
ccatccgctcctgcaa

SEQ ID NO: 1132 - DNA, 16 bp, Homo sapiens
gctccctctgcctgca

SEQ ID NO: 1133 - DNA, 16 bp, Homo sapiens
aggtggatccgtggcc

SEQ ID NO: 1134 - DNA, 16 bp, Homo sapiens
gggaaggtggatccgt

SEQ ID NO: 1135 - DNA, 16 bp, Homo sapiens
acaggagcagggaaag

SEQ ID NO: 1136 - DNA, 16 bp, Homo sapiens
cagactgcggtgagtt

SEQ ID NO: 1137 - DNA, 16 bp, Homo sapiens
ggctcctgggcggcgc

SEQ ID NO: 1138 - DNA, 16 bp, Homo sapiens
ggcggctcctgggcgg

SEQ ID NO: 1139 - DNA, 16 bp, Homo sapiens
cgcgggcggctcctgg

SEQ ID NO: 1140 - DNA, 16 bp, Homo sapiens
gagcgcgggcggctcc

SEQ ID NO: 1141 - DNA, 16 bp, Homo sapiens
ggttcagggagcgcgg

SEQ ID NO: 1142 - DNA, 16 bp, Homo sapiens
agttctagggttcagg

SEQ ID NO: 1143 - DNA, 16 bp, Homo sapiens
cagttctagggttcag

SEQ ID NO: 1144 - DNA, 16 bp, Homo sapiens
acagttctagggttca

SEQ ID NO: 1145 - DNA, 16 bp, Homo sapiens
gacagttctagggttc

SEQ ID NO: 1146 - DNA, 16 bp, Homo sapiens
agacagttctagggtt

SEQ ID NO: 1147 - DNA, 16 bp, Homo sapiens
aagacagttctagggt

SEQ ID NO: 1148 - DNA, 16 bp, Homo sapiens
gaagacagttctaggg

SEQ ID NO: 1149 - DNA, 16 bp, Homo sapiens
cgaagacagttctagg

SEQ ID NO: 1150 - DNA, 16 bp, Homo sapiens
tcgaagacagttctag

SEQ ID NO: 1151 - DNA, 16 bp, Homo sapiens
gtcgaagacagttcta

SEQ ID NO: 1152 - DNA, 16 bp, Homo sapiens
agtcgaagacagttct

SEQ ID NO: 1153 - DNA, 16 bp, Homo sapiens
gagtcgaagacagttc

SEQ ID NO: 1154 - DNA, 16 bp, Homo sapiens
ggagtcgaagacagtt

SEQ ID NO: 1155 - DNA, 16 bp, Homo sapiens
cggagtcgaagacagt

SEQ ID NO: 1156 - DNA, 16 bp, Homo sapiens
ccggagtcgaagacag

SEQ ID NO: 1157 - DNA, 16 bp, Homo sapiens
cccggagtcgaagaca

SEQ ID NO: 1158 - DNA, 16 bp, Homo sapiens
ccccggagtcgaagac

SEQ ID NO: 1159 - DNA, 16 bp, Homo sapiens
gccccggagtcgaaga

SEQ ID NO: 1160 - DNA, 16 bp, Homo sapiens
ggccccggagtcgaag

SEQ ID NO: 1161 - DNA, 16 bp, Homo sapiens
gggccccggagtcgaa

SEQ ID NO: 1162 - DNA, 16 bp, Homo sapiens
cggttgtgaactggca

SEQ ID NO: 1163 - DNA, 16 bp, Homo sapiens
agcggttgtgaactgg

SEQ ID NO: 1164 - DNA, 16 bp, Homo sapiens
tgcactttgcgaacca

SEQ ID NO: 1165 - DNA, 16 bp, Homo sapiens
actttgcgaaccaacg

SEQ ID NO: 1166 - DNA, 16 bp, Homo sapiens
aaagctttgcactttg

SEQ ID NO: 1167 - DNA, 16 bp, Homo sapiens
tcccgagtaagcaggc

SEQ ID NO: 1168 - DNA, 16 bp, Homo sapiens
gcagcgcaagtgagga

SEQ ID NO: 1169 - DNA, 16 bp, Homo sapiens
gtcagcgagtcggagg

SEQ ID NO: 1170 - DNA, 16 bp, Homo sapiens
cctgtcagcgagtcgg

SEQ ID NO: 1171 - DNA, 16 bp, Homo sapiens
gcctgtcagcgagtcg

SEQ ID NO: 1172 - DNA, 16 bp, Homo sapiens
gggtctcagtgcatcc

SEQ ID NO: 1173 - DNA, 16 bp, Homo sapiens
aggtttttccagaggc

SEQ ID NO: 1174 - DNA, 16 bp, Homo sapiens
aaggtttttccagagg

SEQ ID NO: 1175 - DNA, 16 bp, Homo sapiens
ggtcactgctgggtcc

SEQ ID NO: 1176 - DNA, 16 bp, Homo sapiens
gtggtttctgtctgct

SEQ ID NO: 1177 - DNA, 16 bp, Homo sapiens
cgtggtttctgtctgc

SEQ ID NO: 1178 - DNA, 16 bp, Homo sapiens
gaactggcaggcggtg

SEQ ID NO: 1179 - DNA, 16 bp, Homo sapiens
tgtgaactggcaggcg

SEQ ID NO: 1180 - DNA, 16 bp, Homo sapiens
actggagctgggcgga

SEQ ID NO: 1181 - DNA, 16 bp, Homo sapiens
aggactggagctgggc

SEQ ID NO: 1182 - DNA, 16 bp, Homo sapiens
tcacaggactggagct

SEQ ID NO: 1183 - DNA, 16 bp, Homo sapiens
atcacaggactggagc

SEQ ID NO: 1184 - DNA, 16 bp, Homo sapiens
ggatcacaggactgga

SEQ ID NO: 1185 - DNA, 16 bp, Homo sapiens
cagcctggccgaaaga

SEQ ID NO: 1186 - DNA, 16 bp, Homo sapiens
ctcagcctggccgaaa

SEQ ID NO: 1187 - DNA, 16 bp, Homo sapiens
gtcagggcctcagcct

SEQ ID NO: 1188 - DNA, 16 bp, Homo sapiens
cgtcagggcctcagcc

SEQ ID NO: 1189 - DNA, 16 bp, Homo sapiens
tttgcactttgcgaac

SEQ ID NO: 1190 - DNA, 16 bp, Homo sapiens
aatttcccgagtaagc

SEQ ID NO: 1191 - DNA, 16 bp, Homo sapiens
gcaaatttcccgagta

SEQ ID NO: 1192 - DNA, 16 bp, Homo sapiens
agcaaatttcccgagt

SEQ ID NO: 1193 - DNA, 16 bp, Homo sapiens
aagcaaatttcccgag

SEQ ID NO: 1194 - DNA, 16 bp, Homo sapiens
aaagcaaatttcccga

SEQ ID NO: 1195 - DNA, 16 bp, Homo sapiens
aaaagcaaatttcccg

SEQ ID NO: 1196 - DNA, 16 bp, Homo sapiens
gcaaaagcaaatttcc

SEQ ID NO: 1197 - DNA, 16 bp, Homo sapiens
ggcaaaagcaaatttc

SEQ ID NO: 1198 - DNA, 16 bp, Homo sapiens
ttggcaaaagcaaatt

SEQ ID NO: 1199 - DNA, 16 bp, Homo sapiens
gtttggcaaaagcaaa

SEQ ID NO: 1200 - DNA, 16 bp, Homo sapiens
ggtttggcaaaagcaa

SEQ ID NO: 1201 - DNA, 16 bp, Homo sapiens
gggtttggcaaaagca

SEQ ID NO: 1202 - DNA, 16 bp, Homo sapiens
gcgggtttggcaaaag

SEQ ID NO: 1203 - DNA, 16 bp, Homo sapiens
agcgggtttggcaaaa

SEQ ID NO: 1204 - DNA, 16 bp, Homo sapiens
aagcgggtttggcaaa

SEQ ID NO: 1205 - DNA, 16 bp, Homo sapiens
ctccgagagcagcgca

SEQ ID NO: 1206 - DNA, 16 bp, Homo sapiens
gctccgagagcagcgc

SEQ ID NO: 1207 - DNA, 16 bp, Homo sapiens
ggctccgagagcagcg

SEQ ID NO: 1208 - DNA, 16 bp, Homo sapiens
taaatatccaaaccgc

SEQ ID NO: 1209 - DNA, 16 bp, Homo sapiens
gtcaataaatatccaa

SEQ ID NO: 1210 - DNA, 16 bp, Homo sapiens
aggtcaataaatatcc

SEQ ID NO: 1211 - DNA, 16 bp, Homo sapiens
cgaggtcaataaatat

SEQ ID NO: 1212 - DNA, 16 bp, Homo sapiens
acgaggtcaataaata

SEQ ID NO: 1213 - DNA, 16 bp, Homo sapiens
gacgaggtcaataaat

SEQ ID NO: 1214 - DNA, 16 bp, Homo sapiens
ggacgaggtcaataaa

SEQ ID NO: 1215 - DNA, 16 bp, Homo sapiens
aggacgaggtcaataa

SEQ ID NO: 1216 - DNA, 16 bp, Homo sapiens
gaggacgaggtcaata

SEQ ID NO: 1217 - DNA, 16 bp, Homo sapiens
ggaggacgaggtcaat

SEQ ID NO: 1218 - DNA, 16 bp, Homo sapiens
tcggaggacgaggtca

SEQ ID NO: 1219 - DNA, 16 bp, Homo sapiens
gtcggaggacgaggtc

SEQ ID NO: 1220 - DNA, 16 bp, Homo sapiens
agtcggaggacgaggt

SEQ ID NO: 1221 - DNA, 16 bp, Homo sapiens
gagtcggaggacgagg

SEQ ID NO: 1222 - DNA, 16 bp, Homo sapiens
cgagtcggaggacgag

SEQ ID NO: 1223 - DNA, 16 bp, Homo sapiens
agcgagtcggaggacg

SEQ ID NO: 1224 - DNA, 16 bp, Homo sapiens
cagcgagtcggaggac

SEQ ID NO: 1225 - DNA, 16 bp, Homo sapiens
tcagcgagtcggagga

SEQ ID NO: 1226 - DNA, 16 bp, Homo sapiens
tgtcagcgagtcggag

SEQ ID NO: 1227 - DNA, 16 bp, Homo sapiens
ctgtcagcgagtcgga

SEQ ID NO: 1228 - DNA, 16 bp, Homo sapiens
cagtgcatccaaaacg

SEQ ID NO: 1229 - DNA, 16 bp, Homo sapiens
tcagtgcatccaaaac

SEQ ID NO: 1230 - DNA, 16 bp, Homo sapiens
ctcagtgcatccaaaa

SEQ ID NO: 1231 - DNA, 16 bp, Homo sapiens
tctcagtgcatccaaa

SEQ ID NO: 1232 - DNA, 16 bp, Homo sapiens
gtctcagtgcatccaa

SEQ ID NO: 1233 - DNA, 16 bp, Homo sapiens
caataaataccgagga

SEQ ID NO: 1234 - DNA, 16 bp, Homo sapiens
agacaataaataccga

SEQ ID NO: 1235 - DNA, 16 bp, Homo sapiens
cagacaataaataccg

SEQ ID NO: 1236 - DNA, 16 bp, Homo sapiens
cacggaagcacgacac

SEQ ID NO: 1237 - DNA, 16 bp, Homo sapiens
tcacggaagcacgaca

SEQ ID NO: 1238 - DNA, 16 bp, Homo sapiens
ctcacggaagcacgac

SEQ ID NO: 1239 - DNA, 16 bp, Homo sapiens
gtccctctcctcacgg

SEQ ID NO: 1240 - DNA, 16 bp, Homo sapiens
cgtccctctcctcacg

SEQ ID NO: 1241 - DNA, 16 bp, Homo sapiens
cccattcaccaacacg

SEQ ID NO: 1242 - DNA, 16 bp, Homo sapiens
ccccattcaccaacac

SEQ ID NO: 1243 - DNA, 16 bp, Homo sapiens
tccccattcaccaaca

SEQ ID NO: 1244 - DNA, 16 bp, Homo sapiens
gtccccattcaccaac

SEQ ID NO: 1245 - DNA, 16 bp, Homo sapiens
ggtccccattcaccaa

SEQ ID NO: 1246 - DNA, 16 bp, Homo sapiens
cggtccccattcacca

SEQ ID NO: 1247 - DNA, 16 bp, Homo sapiens
ccggtccccattcacc

SEQ ID NO: 1248 - DNA, 16 bp, Homo sapiens
gccggtccccattcac

SEQ ID NO: 1249 - DNA, 16 bp, Homo sapiens
cgccggtccccattca

SEQ ID NO: 1250 - DNA, 16 bp, Homo sapiens
ccgccggtccccattc

SEQ ID NO: 1251 - DNA, 16 bp, Homo sapiens
accgccggtccccatt

SEQ ID NO: 1252 - DNA, 16 bp, Homo sapiens
caccgccggtccccat

SEQ ID NO: 1253 - DNA, 16 bp, Homo sapiens
ccaccgccggtcccca

SEQ ID NO: 1254 - DNA, 16 bp, Homo sapiens
tccaccgccggtcccc

SEQ ID NO: 1255 - DNA, 16 bp, Homo sapiens
atccaccgccggtccc

SEQ ID NO: 1256 - DNA, 16 bp, Homo sapiens
gatccaccgccggtcc

SEQ ID NO: 1257 - DNA, 16 bp, Homo sapiens
tgatccaccgccggtc

SEQ ID NO: 1258 - DNA, 16 bp, Homo sapiens
gtgatccaccgccggt

SEQ ID NO: 1259 - DNA, 16 bp, Homo sapiens
cgtgatccaccgccgg

SEQ ID NO: 1260 - DNA, 16 bp, Homo sapiens
catcctggaaggcgaa

SEQ ID NO: 1261 - DNA, 16 bp, Homo sapiens
tcatcctggaaggcga

SEQ ID NO: 1262 - DNA, 16 bp, Homo sapiens
agttctcatcctggaa

SEQ ID NO: 1263 - DNA, 16 bp, Homo sapiens
tagttctcatcctgga

SEQ ID NO: 1264 - DNA, 16 bp, Homo sapiens
gtagttctcatcctgg

SEQ ID NO: 1265 - DNA, 16 bp, Homo sapiens
caggtacaggtagttc

SEQ ID NO: 1266 - DNA, 16 bp, Homo sapiens
ccaggtacaggtagtt

SEQ ID NO: 1267 - DNA, 16 bp, Homo sapiens
gaccaggtacaggtag

SEQ ID NO: 1268 - DNA, 16 bp, Homo sapiens
ctccatgaccaggtac

SEQ ID NO: 1269 - DNA, 16 bp, Homo sapiens
actccatgaccaggta

SEQ ID NO: 1270 - DNA, 16 bp, Homo sapiens
tactccatgaccaggt

SEQ ID NO: 1271 - DNA, 16 bp, Homo sapiens
atactccatgaccagg

SEQ ID NO: 1272 - DNA, 16 bp, Homo sapiens
aatactccatgaccag

SEQ ID NO: 1273 - DNA, 16 bp, Homo sapiens
taatactccatgacca

SEQ ID NO: 1274 - DNA, 16 bp, Homo sapiens
gtaatactccatgacc

SEQ ID NO: 1275 - DNA, 16 bp, Homo sapiens
cgtaatactccatgac

SEQ ID NO: 1276 - DNA, 16 bp, Homo sapiens
cttgctcagcagtgtc

SEQ ID NO: 1277 - DNA, 16 bp, Homo sapiens
acttgctcagcagtgt

SEQ ID NO: 1278 - DNA, 16 bp, Homo sapiens
aacttgctcagcagtg

SEQ ID NO: 1279 - DNA, 16 bp, Homo sapiens
gctccccaaacttgct

SEQ ID NO: 1280 - DNA, 16 bp, Homo sapiens
cgctccccaaacttgc

SEQ ID NO: 1281 - DNA, 16 bp, Homo sapiens
ccgctccccaaacttg

SEQ ID NO: 1282 - DNA, 16 bp, Homo sapiens
tccgctccccaaactt

SEQ ID NO: 1283 - DNA, 16 bp, Homo sapiens
atccgctccccaaact

SEQ ID NO: 1284 - DNA, 16 bp, Homo sapiens
aatccgctccccaaac

SEQ ID NO: 1285 - DNA, 16 bp, Homo sapiens
gaatccgctccccaaa

SEQ ID NO: 1286 - DNA, 16 bp, Homo sapiens
ggaatccgctccccaa

SEQ ID NO: 1287 - DNA, 16 bp, Homo sapiens
cggaatccgctcccca

SEQ ID NO: 1288 - DNA, 16 bp, Homo sapiens
ccggaatccgctcccc

SEQ ID NO: 1289 - DNA, 16 bp, Homo sapiens
gccggaatccgctccc

SEQ ID NO: 1290 - DNA, 16 bp, Homo sapiens
agaagcgcgccatctc

SEQ ID NO: 1291 - DNA, 16 bp, Homo sapiens
tagaagcgcgccatct

SEQ ID NO: 1292 - DNA, 16 bp, Homo sapiens
gtagaagcgcgccatc

SEQ ID NO: 1293 - DNA, 16 bp, Homo sapiens
ggtagaagcgcgccat

SEQ ID NO: 1294 - DNA, 16 bp, Homo sapiens
aggtagaagcgcgcca

SEQ ID NO: 1295 - DNA, 16 bp, Homo sapiens
caggtagaagcgcgcc

SEQ ID NO: 1296 - DNA, 16 bp, Homo sapiens
ccaggtagaagcgcgc

SEQ ID NO: 1297 - DNA, 16 bp, Homo sapiens
gccaggtagaagcgcg

SEQ ID NO: 1298 - DNA, 16 bp, Homo sapiens
cgccaggtagaagcgc

SEQ ID NO: 1299 - DNA, 16 bp, Homo sapiens
ccgccaggtagaagcg

SEQ ID NO: 1300 - DNA, 16 bp, Homo sapiens
tccgccaggtagaagc

SEQ ID NO: 1301 - DNA, 16 bp, Homo sapiens
tgacaatctccgccag

SEQ ID NO: 1302 - DNA, 16 bp, Homo sapiens
atgacaatctccgcca

SEQ ID NO: 1303 - DNA, 16 bp, Homo sapiens
catgacaatctccgcc

SEQ ID NO: 1304 - DNA, 16 bp, Homo sapiens
ccatgacaatctccgc

SEQ ID NO: 1305 - DNA, 16 bp, Homo sapiens
gccatgacaatctccg

SEQ ID NO: 1306 - DNA, 16 bp, Homo sapiens
ggccatgacaatctcc

SEQ ID NO: 1307 - DNA, 16 bp, Homo sapiens
ccaactgttctcttag

SEQ ID NO: 1308 - DNA, 16 bp, Homo sapiens
aaccaactgttctctt

SEQ ID NO: 1309 - DNA, 16 bp, Homo sapiens
ccagtaataaaagctg

SEQ ID NO: 1310 - DNA, 16 bp, Homo sapiens
gtccagtaataaaagc

SEQ ID NO: 1311 - DNA, 16 bp, Homo sapiens
gttgtccagtaataaa

SEQ ID NO: 1312 - DNA, 16 bp, Homo sapiens
atgttgtccagtaata

SEQ ID NO: 1313 - DNA, 16 bp, Homo sapiens
taatgttgtccagtaa

SEQ ID NO: 1314 - DNA, 16 bp, Homo sapiens
ttcaatcctgacccac

SEQ ID NO: 1315 - DNA, 16 bp, Homo sapiens
ggttcaatcctgaccc

SEQ ID NO: 1316 - DNA, 16 bp, Homo sapiens
tgggttcaatcctgac

SEQ ID NO: 1317 - DNA, 16 bp, Homo sapiens
gatgggttcaatcctg

SEQ ID NO: 1318 - DNA, 16 bp, Homo sapiens
aggatgggttcaatcc

SEQ ID NO: 1319 - DNA, 16 bp, Homo sapiens
agaggatgggttcaat

SEQ ID NO: 1320 - DNA, 16 bp, Homo sapiens
atagaggatgggttca

SEQ ID NO: 1321 - DNA, 16 bp, Homo sapiens
ccctcctgtgggaaca

SEQ ID NO: 1322 - DNA, 16 bp, Homo sapiens
gtccctcctgtgggaa

SEQ ID NO: 1323 - DNA, 16 bp, Homo sapiens
cagtccctcctgtggg

SEQ ID NO: 1324 - DNA, 16 bp, Homo sapiens
agcagtccctcctgtg

SEQ ID NO: 1325 - DNA, 16 bp, Homo sapiens
actcagctgtgggaag

SEQ ID NO: 1326 - DNA, 16 bp, Homo sapiens
cccactcagctgtggg

SEQ ID NO: 1327 - DNA, 16 bp, Homo sapiens
accccactcagctgtg

SEQ ID NO: 1328 - DNA, 16 bp, Homo sapiens
acaccccactcagctg

SEQ ID NO: 1329 - DNA, 16 bp, Homo sapiens
gcacaccccactcagc

SEQ ID NO: 1330 - DNA, 16 bp, Homo sapiens
tcagcacaccccactc

SEQ ID NO: 1331 - DNA, 16 bp, Homo sapiens
gtggtcctaagactgg

SEQ ID NO: 1332 - DNA, 16 bp, Homo sapiens
gatgtggtcctaagac

SEQ ID NO: 1333 - DNA, 16 bp, Homo sapiens
cagatgtggtcctaag

SEQ ID NO: 1334 - DNA, 16 bp, Homo sapiens
cctccacagatgtggt

SEQ ID NO: 1335 - DNA, 16 bp, Homo sapiens
cacctccacagatgtg

SEQ ID NO: 1336 - DNA, 16 bp, Homo sapiens
ggccacctccacagat

SEQ ID NO: 1337 - DNA, 16 bp, Homo sapiens
tgcttggctctggcca

SEQ ID NO: 1338 - DNA, 16 bp, Homo sapiens
actgcttggctctggc

SEQ ID NO: 1339 - DNA, 16 bp, Homo sapiens
agactgcttggctctg

SEQ ID NO: 1340 - DNA, 16 bp, Homo sapiens
ggagactgcttggctc

SEQ ID NO: 1341 - DNA, 16 bp, Homo sapiens
tgcagacccctcttct

SEQ ID NO: 1342 - DNA, 16 bp, Homo sapiens
ctcctcccttgacatg

SEQ ID NO: 1343 - DNA, 16 bp, Homo sapiens
ccagacccccatgttc

SEQ ID NO: 1344 - DNA, 16 bp, Homo sapiens
gtccagacccccatgt

SEQ ID NO: 1345 - DNA, 16 bp, Homo sapiens
gggtccagacccccat

SEQ ID NO: 1346 - DNA, 16 bp, Homo sapiens
accttctgcagggact

SEQ ID NO: 1347 - DNA, 16 bp, Homo sapiens
taaaccttctgcaggg

SEQ ID NO: 1348 - DNA, 16 bp, Homo sapiens
gaaaagccctgcccct

SEQ ID NO: 1349 - DNA, 16 bp, Homo sapiens
taggaaaagccctgcc

SEQ ID NO: 1350 - DNA, 16 bp, Homo sapiens
cttaggaaaagccctg

SEQ ID NO: 1351 - DNA, 16 bp, Homo sapiens
tgcttaggaaaagccc

SEQ ID NO: 1352 - DNA, 16 bp, Homo sapiens
tctgcttaggaaaagc

SEQ ID NO: 1353 - DNA, 16 bp, Homo sapiens
ctcctctgcttaggaa

SEQ ID NO: 1354 - DNA, 16 bp, Homo sapiens
ccctcctctgcttagg

SEQ ID NO: 1355 - DNA, 16 bp, Homo sapiens
ctgatttgaggaaggg

SEQ ID NO: 1356 - DNA, 16 bp, Homo sapiens
tcctgatttgaggaag

SEQ ID NO: 1357 - DNA, 16 bp, Homo sapiens
cctcctgatttgagga

SEQ ID NO: 1358 - DNA, 16 bp, Homo sapiens
gacctcctgatttgag

SEQ ID NO: 1359 - DNA, 16 bp, Homo sapiens
aagacctcctgatttg

SEQ ID NO: 1360 - DNA, 16 bp, Homo sapiens
ccaagacctcctgatt

SEQ ID NO: 1361 - DNA, 16 bp, Homo sapiens
ctgcttccaagacctc

SEQ ID NO: 1362 - DNA, 16 bp, Homo sapiens
agctgcttccaagacc

SEQ ID NO: 1363 - DNA, 16 bp, Homo sapiens
gcagctgcttccaaga

SEQ ID NO: 1364 - DNA, 16 bp, Homo sapiens
ctggtggagaaccaga

SEQ ID NO: 1365 - DNA, 16 bp, Homo sapiens
ctctggtggagaacca

SEQ ID NO: 1366 - DNA, 16 bp, Homo sapiens
ttctctggtggagaac

SEQ ID NO: 1367 - DNA, 16 bp, Homo sapiens
gattctctggtggaga

SEQ ID NO: 1368 - DNA, 16 bp, Homo sapiens
acttactgtttcatcc

SEQ ID NO: 1369 - DNA, 16 bp, Homo sapiens
cggaccccctcccctc

SEQ ID NO: 1370 - DNA, 16 bp, Homo sapiens
gacggaccccctcccc

SEQ ID NO: 1371 - DNA, 16 bp, Homo sapiens
ctgacggaccccctcc

SEQ ID NO: 1372 - DNA, 16 bp, Homo sapiens
ccctgacggaccccct

SEQ ID NO: 1373 - DNA, 16 bp, Homo sapiens
aagccctcaccttttc

SEQ ID NO: 1374 - DNA, 16 bp, Homo sapiens
ggaagccctcaccttt

SEQ ID NO: 1375 - DNA, 16 bp, Homo sapiens
cgggaagccctcacct

SEQ ID NO: 1376 - DNA, 16 bp, Homo sapiens
cccgggaagccctcac

SEQ ID NO: 1377 - DNA, 16 bp, Homo sapiens
cacccgggaagccctc

SEQ ID NO: 1378 - DNA, 16 bp, Homo sapiens
gccacccgggaagccc

SEQ ID NO: 1379 - DNA, 16 bp, Homo sapiens
acgccacccgggaagc

SEQ ID NO: 1380 - DNA, 16 bp, Homo sapiens
ctgttcaggaagtccc

SEQ ID NO: 1381 - DNA, 16 bp, Homo sapiens
ttctgttcaggaagtc

SEQ ID NO: 1382 - DNA, 16 bp, Homo sapiens
gcttctgttcaggaag

SEQ ID NO: 1383 - DNA, 16 bp, Homo sapiens
gcttgggcccacccct

SEQ ID NO: 1384 - DNA, 16 bp, Homo sapiens
aggcttgggcccaccc

SEQ ID NO: 1385 - DNA, 16 bp, Homo sapiens
cgaggcttgggcccac

SEQ ID NO: 1386 - DNA, 16 bp, Homo sapiens
agcgaggcttgggccc

SEQ ID NO: 1387 - DNA, 16 bp, Homo sapiens
agagcgaggcttgggc

SEQ ID NO: 1388 - DNA, 16 bp, Homo sapiens
gcagagcgaggcttgg

SEQ ID NO: 1389 - DNA, 16 bp, Homo sapiens
gagcagagcgaggctt

SEQ ID NO: 1390 - DNA, 16 bp, Homo sapiens
aaaggagcagagcgag

SEQ ID NO: 1391 - DNA, 16 bp, Homo sapiens
caaaaggagcagagcg

SEQ ID NO: 1392 - DNA, 16 bp, Homo sapiens
tggaccaaaaggagca

SEQ ID NO: 1393 - DNA, 16 bp, Homo sapiens
cctggaccaaaaggag

SEQ ID NO: 1394 - DNA, 16 bp, Homo sapiens
cacctggaccaaaagg

SEQ ID NO: 1395 - DNA, 16 bp, Homo sapiens
cgcacctggaccaaaa

SEQ ID NO: 1396 - DNA, 16 bp, Homo sapiens
gaccgcacctggacca

SEQ ID NO: 1397 - DNA, 16 bp, Homo sapiens
accttgtagtggacga

SEQ ID NO: 1398 - DNA, 16 bp, Homo sapiens
tcaccttgtagtggac

SEQ ID NO: 1399 - DNA, 16 bp, Homo sapiens
gctcaccttgtagtgg

SEQ ID NO: 1400 - DNA, 16 bp, Homo sapiens
ggagaggaggcgatag

SEQ ID NO: 1401 - DNA, 16 bp, Homo sapiens
agggagaggaggcgat

SEQ ID NO: 1402 - DNA, 16 bp, Homo sapiens
ctcctgctcagaggga

SEQ ID NO: 1403 - DNA, 16 bp, Homo sapiens
gtgctcctgctcagag

SEQ ID NO: 1404 - DNA, 16 bp, Homo sapiens
aggtgctcctgctcag

SEQ ID NO: 1405 - DNA, 16 bp, Homo sapiens
agaggtgctcctgctc

SEQ ID NO: 1406 - DNA, 16 bp, Homo sapiens
agagaggtgctcctgc

SEQ ID NO: 1407 - DNA, 16 bp, Homo sapiens
accccgcccccgctca

SEQ ID NO: 1408 - DNA, 16 bp, Homo sapiens
ctaccccgcccccgct

SEQ ID NO: 1409 - DNA, 16 bp, Homo sapiens
acctaccccgcccccg

SEQ ID NO: 1410 - DNA, 16 bp, Homo sapiens
gtacctaccccgcccc

SEQ ID NO: 1411 - DNA, 16 bp, Homo sapiens
aggtacctaccccgcc

SEQ ID NO: 1412 - DNA, 16 bp, Homo sapiens
gggaggttcccgcagc

SEQ ID NO: 1413 - DNA, 16 bp, Homo sapiens
gtccttactccaactt

SEQ ID NO: 1414 - DNA, 16 bp, Homo sapiens
ctgtccttactccaac

SEQ ID NO: 1415 - DNA, 16 bp, Homo sapiens
cactgtccttactcca

SEQ ID NO: 1416 - DNA, 16 bp, Homo sapiens
ggcactgtccttactc

SEQ ID NO: 1417 - DNA, 16 bp, Homo sapiens
taggcactgtccttac

SEQ ID NO: 1418 - DNA, 16 bp, Homo sapiens
ggtaggcactgtcctt

SEQ ID NO: 1419 - DNA, 16 bp, Homo sapiens
gtcactgctgggtcct

SEQ ID NO: 1420 - DNA, 16 bp, Homo sapiens
aggtcactgctgggtc

SEQ ID NO: 1421 - DNA, 16 bp, Homo sapiens
ctaggtcactgctggg

SEQ ID NO: 1422 - DNA, 16 bp, Homo sapiens
gtctaggtcactgctg

SEQ ID NO: 1423 - DNA, 16 bp, Homo sapiens
aagtctaggtcactgc

SEQ ID NO: 1424 - DNA, 16 bp, Homo sapiens
gcactccattgtctca

SEQ ID NO: 1425 - DNA, 16 bp, Homo sapiens
ctgcactccattgtct

SEQ ID NO: 1426 - DNA, 16 bp, Homo sapiens
ccctgcactccattgt

SEQ ID NO: 1427 - DNA, 16 bp, Homo sapiens
ccccctgcactccatt

SEQ ID NO: 1428 - DNA, 16 bp, Homo sapiens
cttgctgagtcaggag

SEQ ID NO: 1429 - DNA, 16 bp, Homo sapiens
tccttgctgagtcagg

SEQ ID NO: 1430 - DNA, 16 bp, Homo sapiens
cttccttgctgagtca

SEQ ID NO: 1431 - DNA, 16 bp, Homo sapiens
accttccttgctgagt

SEQ ID NO: 1432 - DNA, 16 bp, Homo sapiens
ggaccttccttgctga

SEQ ID NO: 1433 - DNA, 16 bp, Homo sapiens
caggaccttccttgct

SEQ ID NO: 1434 - DNA, 16 bp, Homo sapiens
agccctccaggacctt

SEQ ID NO: 1435 - DNA, 16 bp, Homo sapiens
tagctccccactccag

SEQ ID NO: 1436 - DNA, 16 bp, Homo sapiens
gatagctccccactcc

SEQ ID NO: 1437 - DNA, 16 bp, Homo sapiens
cagatagctccccact

SEQ ID NO: 1438 - DNA, 16 bp, Homo sapiens
ctcagatagctcccca

SEQ ID NO: 1439 - DNA, 16 bp, Homo sapiens
agctcagatagctccc

SEQ ID NO: 1440 - DNA, 16 bp, Homo sapiens
tcagctcagatagctc

SEQ ID NO: 1441 - DNA, 16 bp, Homo sapiens
tctcagctcagatagc

SEQ ID NO: 1442 - DNA, 16 bp, Homo sapiens
gagtcctctcctgctt

SEQ ID NO: 1443 - DNA, 16 bp, Homo sapiens
ggaggagtcctctcct

SEQ ID NO: 1444 - DNA, 16 bp, Homo sapiens
gaggaggagtcctctc

SEQ ID NO: 1445 - DNA, 16 bp, Homo sapiens
caaaagggcacccaga

SEQ ID NO: 1446 - DNA, 16 bp, Homo sapiens
agcaaaagggcaccca

SEQ ID NO: 1447 - DNA, 16 bp, Homo sapiens
ggatccccagtattgt

SEQ ID NO: 1448 - DNA, 16 bp, Homo sapiens
ctggatccccagtatt

SEQ ID NO: 1449 - DNA, 16 bp, Homo sapiens
tgctggatccccagta

SEQ ID NO: 1450 - DNA, 16 bp, Homo sapiens
attctctagactgcaa

SEQ ID NO: 1451 - DNA, 16 bp, Homo sapiens
taattctctagactgc

SEQ ID NO: 1452 - DNA, 16 bp, Homo sapiens
tctaattctctagact

SEQ ID NO: 1453 - DNA, 16 bp, Homo sapiens
tctctaattctctaga

SEQ ID NO: 1454 - DNA, 16 bp, Homo sapiens
ctccataattctctaa

SEQ ID NO: 1455 - DNA, 16 bp, Homo sapiens
actctccataattctc

SEQ ID NO: 1456 - DNA, 16 bp, Homo sapiens
acactctccataattc

SEQ ID NO: 1457 - DNA, 16 bp, Homo sapiens
ccacactctccataat

SEQ ID NO: 1458 - DNA, 16 bp, Homo sapiens
tgccacactctccata

SEQ ID NO: 1459 - DNA, 16 bp, Homo sapiens
cccatgcccatcctgc

SEQ ID NO: 1460 - DNA, 16 bp, Homo sapiens
ggacagagaaatgttg

SEQ ID NO: 1461 - DNA, 16 bp, Homo sapiens
ggcataggacagagaa

SEQ ID NO: 1462 - DNA, 16 bp, Homo sapiens
gtggcataggacagag

SEQ ID NO: 1463 - DNA, 16 bp, Homo sapiens
tggtggcataggacag

SEQ ID NO: 1464 - DNA, 16 bp, Homo sapiens
cttactctgcccctcc

SEQ ID NO: 1465 - DNA, 16 bp, Homo sapiens
accttactctgcccct

SEQ ID NO: 1466 - DNA, 16 bp, Homo sapiens
tgaccttactctgccc

SEQ ID NO: 1467 - DNA, 16 bp, Homo sapiens
gctgaccttactctgc

SEQ ID NO: 1468 - DNA, 16 bp, Homo sapiens
ctgctgaccttactct

SEQ ID NO: 1469 - DNA, 16 bp, Homo sapiens
ctctgctgaccttact

SEQ ID NO: 1470 - DNA, 16 bp, Homo sapiens
gcctctgctgacctta

SEQ ID NO: 1471 - DNA, 16 bp, Homo sapiens
ccatggctctgagtca

SEQ ID NO: 1472 - DNA, 16 bp, Homo sapiens
agccatggctctgagt

SEQ ID NO: 1473 - DNA, 16 bp, Homo sapiens
taagccatggctctga

SEQ ID NO: 1474 - DNA, 16 bp, Homo sapiens
tagcctgctgtgactc

SEQ ID NO: 1475 - DNA, 16 bp, Homo sapiens
atgggaggctgttggc

SEQ ID NO: 1476 - DNA, 16 bp, Homo sapiens
ccatgggaggctgttg

SEQ ID NO: 1477 - DNA, 16 bp, Homo sapiens
ggccatgggaggctgt

SEQ ID NO: 1478 - DNA, 16 bp, Homo sapiens
gtgcagagaggccatg

SEQ ID NO: 1479 - DNA, 16 bp, Homo sapiens
gagctcccagcatgac

SEQ ID NO: 1480 - DNA, 16 bp, Homo sapiens
agggagctcccagcat

SEQ ID NO: 1481 - DNA, 16 bp, Homo sapiens
gccatagagcccactt

SEQ ID NO: 1482 - DNA, 16 bp, Homo sapiens
gggccatagagcccac

SEQ ID NO: 1483 - DNA, 16 bp, Homo sapiens
atgctggccctcctgg

SEQ ID NO: 1484 - DNA, 16 bp, Homo sapiens
agctgccccatgctgg

SEQ ID NO: 1485 - DNA, 16 bp, Homo sapiens
cgcccctggcagctgc

SEQ ID NO: 1486 - DNA, 16 bp, Homo sapiens
tgcgcccctggcagct

SEQ ID NO: 1487 - DNA, 16 bp, Homo sapiens
gctgcgcccctggcag

SEQ ID NO: 1488 - DNA, 16 bp, Homo sapiens
cggctgcgcccctggc

SEQ ID NO: 1489 - DNA, 16 bp, Homo sapiens
gtcggctgcgcccctg

SEQ ID NO: 1490 - DNA, 16 bp, Homo sapiens
ctgtcggctgcgcccc

SEQ ID NO: 1491 - DNA, 16 bp, Homo sapiens
gcctgtcggctgcgcc

SEQ ID NO: 1492 - DNA, 16 bp, Homo sapiens
ctgcctgtcggctgcg

SEQ ID NO: 1493 - DNA, 16 bp, Homo sapiens
acctgcctgtcggctg

SEQ ID NO: 1494 - DNA, 16 bp, Homo sapiens
acacctgcctgtcggc

SEQ ID NO: 1495 - DNA, 16 bp, Homo sapiens
gaacacctgcctgtcg

SEQ ID NO: 1496 - DNA, 16 bp, Homo sapiens
ccgaacacctgcctgt

SEQ ID NO: 1497 - DNA, 16 bp, Homo sapiens
cgccgaacacctgcct

SEQ ID NO: 1498 - DNA, 16 bp, Homo sapiens
cctgggcacctgttgg

SEQ ID NO: 1499 - DNA, 16 bp, Homo sapiens
gtgcctgggcacctgt

SEQ ID NO: 1500 - DNA, 16 bp, Homo sapiens
cgccctcccagtgcct

SEQ ID NO: 1501 - DNA, 16 bp, Homo sapiens
accgccctcccagtgc

SEQ ID NO: 1502 - DNA, 16 bp, Homo sapiens
tcaccgccctcccagt

SEQ ID NO: 1503 - DNA, 16 bp, Homo sapiens
agtcaccgccctccca

SEQ ID NO: 1504 - DNA, 16 bp, Homo sapiens
tgagtcaccgccctcc

SEQ ID NO: 1505 - DNA, 16 bp, Homo sapiens
cgtgagtcaccgccct

SEQ ID NO: 1506 - DNA, 16 bp, Homo sapiens
caaagctggttctccc

SEQ ID NO: 1507 - DNA, 16 bp, Homo sapiens
tgcaaagctggttctc

SEQ ID NO: 1508 - DNA, 16 bp, Homo sapiens
tctgcaaagctggttc

SEQ ID NO: 1509 - DNA, 16 bp, Homo sapiens
tgtctgcaaagctggt

SEQ ID NO: 1510 - DNA, 16 bp, Homo sapiens
cctgtctgcaaagctg

SEQ ID NO: 1511 - DNA, 16 bp, Homo sapiens
cgcctgtctgcaaagc

SEQ ID NO: 1512 - DNA, 16 bp, Homo sapiens
ttgtccctcctggatc

SEQ ID NO: 1513 - DNA, 16 bp, Homo sapiens
agttgtccctcctgga

SEQ ID NO: 1514 - DNA, 16 bp, Homo sapiens
aaagttgtccctcctg

SEQ ID NO: 1515 - DNA, 16 bp, Homo sapiens
ccaaagttgtccctcc

SEQ ID NO: 1516 - DNA, 16 bp, Homo sapiens
acccaaagttgtccct

SEQ ID NO: 1517 - DNA, 16 bp, Homo sapiens
gaacccaaagttgtcc

SEQ ID NO: 1518 - DNA, 16 bp, Homo sapiens
gaagaacccaaagttg

SEQ ID NO: 1519 - DNA, 16 bp, Homo sapiens
ccagaagaacccaaag

SEQ ID NO: 1520 - DNA, 16 bp, Homo sapiens
cacccagaagaaccca

SEQ ID NO: 1521 - DNA, 16 bp, Homo sapiens
gcagaacctacaaaag

SEQ ID NO: 1522 - DNA, 16 bp, Homo sapiens
gtgcagaacctacaaa

SEQ ID NO: 1523 - DNA, 16 bp, Homo sapiens
gggtgcagaacctaca

SEQ ID NO: 1524 - DNA, 16 bp, Homo sapiens
gtgggtgcagaaccta

SEQ ID NO: 1525 - DNA, 16 bp, Homo sapiens
ccacacggctcatagg

SEQ ID NO: 1526 - DNA, 16 bp, Homo sapiens
acccacacggctcata

SEQ ID NO: 1527 - DNA, 16 bp, Homo sapiens
tgacccacacggctca

SEQ ID NO: 1528 - DNA, 16 bp, Homo sapiens
gctgacccacacggct

SEQ ID NO: 1529 - DNA, 16 bp, Homo sapiens
tggctgacccacacgg

SEQ ID NO: 1530 - DNA, 16 bp, Homo sapiens
ggtggctgacccacac

SEQ ID NO: 1531 - DNA, 16 bp, Homo sapiens
atggtggctgacccac

SEQ ID NO: 1532 - DNA, 16 bp, Homo sapiens
gaatggtggctgaccc

SEQ ID NO: 1533 - DNA, 16 bp, Homo sapiens
ctaaaggacgcaggga

SEQ ID NO: 1534 - DNA, 16 bp, Homo sapiens
aactaaaggacgcagg

SEQ ID NO: 1535 - DNA, 16 bp, Homo sapiens
gagaactaaaggacgc

SEQ ID NO: 1536 - DNA, 16 bp, Homo sapiens
attggtcccaagcccc

SEQ ID NO: 1537 - DNA, 16 bp, Homo sapiens
ccattggtcccaagcc

SEQ ID NO: 1538 - DNA, 16 bp, Homo sapiens
gcccattggtcccaag

SEQ ID NO: 1539 - DNA, 16 bp, Homo sapiens
acgcccattggtccca

SEQ ID NO: 1540 - DNA, 16 bp, Homo sapiens
ccacgcccattggtcc

SEQ ID NO: 1541 - DNA, 16 bp, Homo sapiens
caccacgcccattggt

SEQ ID NO: 1542 - DNA, 16 bp, Homo sapiens
agacccaactccaccc

SEQ ID NO: 1543 - DNA, 16 bp, Homo sapiens
tcacctcgcccctctt

SEQ ID NO: 1544 - DNA, 16 bp, Homo sapiens
cctcacctcgcccctc

SEQ ID NO: 1545 - DNA, 16 bp, Homo sapiens
agcccctcacctcgcc

SEQ ID NO: 1546 - DNA, 16 bp, Homo sapiens
ctcaaagccccccacg

SEQ ID NO: 1547 - DNA, 16 bp, Homo sapiens
atcctcaaagcccccc

SEQ ID NO: 1548 - DNA, 16 bp, Homo sapiens
ggatcctcaaagcccc

SEQ ID NO: 1549 - DNA, 16 bp, Homo sapiens
gcggatcctcaaagcc

SEQ ID NO: 1550 - DNA, 16 bp, Homo sapiens
gcgcggatcctcaaag

SEQ ID NO: 1551 - DNA, 16 bp, Homo sapiens
gggcgcggatcctcaa

SEQ ID NO: 1552 - DNA, 16 bp, Homo sapiens
gagctgcagccggaga

SEQ ID NO: 1553 - DNA, 16 bp, Homo sapiens
aggagctgcagccgga

SEQ ID NO: 1554 - DNA, 16 bp, Homo sapiens
cggaggagctgcagcc

SEQ ID NO: 1555 - DNA, 16 bp, Homo sapiens
acccggaggagctgca

SEQ ID NO: 1556 - DNA, 16 bp, Homo sapiens
gcacccggaggagctg

SEQ ID NO: 1557 - DNA, 16 bp, Homo sapiens
gggcacccggaggagc

SEQ ID NO: 1558 - DNA, 16 bp, Homo sapiens
cagggcacccggagga

SEQ ID NO: 1559 - DNA, 16 bp, Homo sapiens
tgcagggcacccggag

SEQ ID NO: 1560 - DNA, 16 bp, Homo sapiens
cctgcagggcacccgg

SEQ ID NO: 1561 - DNA, 16 bp, Homo sapiens
cgacacctgcagggca

SEQ ID NO: 1562 - DNA, 16 bp, Homo sapiens
cacgacacctgcaggg

SEQ ID NO: 1563 - DNA, 16 bp, Homo sapiens
agcacgacacctgcag

SEQ ID NO: 1564 - DNA, 16 bp, Homo sapiens
gaagcacgacacctgc

SEQ ID NO: 1565 - DNA, 16 bp, Homo sapiens
ccaggtagttctcatc

SEQ ID NO: 1566 - DNA, 16 bp, Homo sapiens
caccaggtagttctca

SEQ ID NO: 1567 - DNA, 16 bp, Homo sapiens
ctcaccaggtagttct

SEQ ID NO: 1568 - DNA, 16 bp, Homo sapiens
agctcaccaggtagtt

SEQ ID NO: 1569 - DNA, 16 bp, Homo sapiens
ggagctcaccaggtag

SEQ ID NO: 1570 - DNA, 16 bp, Homo sapiens
ccggagctcaccaggt

SEQ ID NO: 1571 - DNA, 16 bp, Homo sapiens
gcccggagctcaccag

SEQ ID NO: 1572 - DNA, 16 bp, Homo sapiens
tagagcttcctctccc

SEQ ID NO: 1573 - DNA, 16 bp, Homo sapiens
cctagagcttcctctc

SEQ ID NO: 1574 - DNA, 16 bp, Homo sapiens
atcctagagcttcctc

SEQ ID NO: 1575 - DNA, 16 bp, Homo sapiens
caatcctagagcttcc

SEQ ID NO: 1576 - DNA, 16 bp, Homo sapiens
cccaatcctagagctt

SEQ ID NO: 1577 - DNA, 16 bp, Homo sapiens
cccccaatcctagagc

SEQ ID NO: 1578 - DNA, 16 bp, Homo sapiens
cacccccaatcctaga

SEQ ID NO: 1579 - DNA, 16 bp, Homo sapiens
agcacccccaatccta

SEQ ID NO: 1580 - DNA, 16 bp, Homo sapiens
gcagcacccccaatcc

SEQ ID NO: 1581 - DNA, 16 bp, Homo sapiens
gggcagcacccccaat

SEQ ID NO: 1582 - DNA, 16 bp, Homo sapiens
tgacacaccctcttac

SEQ ID NO: 1583 - DNA, 16 bp, Homo sapiens
cctgacacaccctctt

SEQ ID NO: 1584 - DNA, 16 bp, Homo sapiens
cacctgacacaccctc

SEQ ID NO: 1585 - DNA, 16 bp, Homo sapiens
tccacctgacacaccc

SEQ ID NO: 1586 - DNA, 16 bp, Homo sapiens
catccacctgacacac

SEQ ID NO: 1587 - DNA, 16 bp, Homo sapiens
ctcatccacctgacac

SEQ ID NO: 1588 - DNA, 16 bp, Homo sapiens
ccctcatccacctgac

SEQ ID NO: 1589 - DNA, 16 bp, Homo sapiens
gcccctcatccacctg

SEQ ID NO: 1590 - DNA, 16 bp, Homo sapiens
aggcccctcatccacc

SEQ ID NO: 1591 - DNA, 16 bp, Homo sapiens
gaaggcccctcatcca

SEQ ID NO: 1592 - DNA, 16 bp, Homo sapiens
aggtaagagacccccc

SEQ ID NO: 1593 - DNA, 16 bp, Homo sapiens
ccaggtaagagacccc

SEQ ID NO: 1594 - DNA, 16 bp, Homo sapiens
ttccaggtaagagacc

SEQ ID NO: 1595 - DNA, 16 bp, Homo sapiens
ccattccaggtaagag

SEQ ID NO: 1596 - DNA, 16 bp, Homo sapiens
tcccattccaggtaag

SEQ ID NO: 1597 - DNA, 16 bp, Homo sapiens
tatcccattccaggta

SEQ ID NO: 1598 - DNA, 16 bp, Homo sapiens
cctatcccattccagg

SEQ ID NO: 1599 - DNA, 16 bp, Homo sapiens
gacctatcccattcca

SEQ ID NO: 1600 - DNA, 16 bp, Homo sapiens
aagacctatcccattc

SEQ ID NO: 1601 - DNA, 16 bp, Homo sapiens
tgaagacctatcccat

SEQ ID NO: 1602 - DNA, 16 bp, Homo sapiens
tggccccgttagaatt

SEQ ID NO: 1603 - DNA, 16 bp, Homo sapiens
agtggccccgttagaa

SEQ ID NO: 1604 - DNA, 16 bp, Homo sapiens
gcagtggccccgttag

SEQ ID NO: 1605 - DNA, 16 bp, Homo sapiens
aggcagtggccccgtt

SEQ ID NO: 1606 - DNA, 16 bp, Homo sapiens
ctaggcagtggccccg

SEQ ID NO: 1607 - DNA, 16 bp, Homo sapiens
ccctaggcagtggccc

SEQ ID NO: 1608 - DNA, 16 bp, Homo sapiens
aggtcccagacactcc

SEQ ID NO: 1609 - DNA, 16 bp, Homo sapiens
ataggtcccagacact

SEQ ID NO: 1610 - DNA, 16 bp, Homo sapiens
gaataggtcccagaca

SEQ ID NO: 1611 - DNA, 16 bp, Homo sapiens
gagaataggtcccaga

SEQ ID NO: 1612 - DNA, 16 bp, Homo sapiens
cagagaataggtccca

SEQ ID NO: 1613 - DNA, 20 bp, Homo sapiens
ctggctgcatgtctgcctgt

SEQ ID NO: 1614 - DNA, 20 bp, Homo sapiens
ccaggagaaggtcgagcagg

SEQ ID NO: 1615 - DNA, 20 bp, Homo sapiens
tctatggccatgacaatctc

SEQ ID NO: 1616 - DNA, 20 bp, Homo sapiens
atgtccctgtgcacgtagcc

SEQ ID NO: 1617 - DNA, 20 bp, Homo sapiens
atgtgtccggaagtcgcctg

SEQ ID NO: 1618 - DNA, 20 bp, Homo sapiens
ctcaggctctgccgggtgag

SEQ ID NO: 1619 - DNA, 20 bp, Homo sapiens
ggcactggcccacagccacg

SEQ ID NO: 1620 - DNA, 20 bp, Homo sapiens
cctggccgaaagaaagaaat

SEQ ID NO: 1621 - DNA, 20 bp, Homo sapiens
aaagaaatggtctgtgatcc

SEQ ID NO: 1622 - DNA, 20 bp, Homo sapiens
aagaaagaaatggtctgtga

SEQ ID NO: 1623 - DNA, 20 bp, Homo sapiens
ggccgaaagaaagaaatggt

SEQ ID NO: 1624 - DNA, 20 bp, Homo sapiens
cctcagcctggccgaaagaa

SEQ ID NO: 1625 - DNA, 20 bp, Homo sapiens
gggcctcagcctggccgaaa

SEQ ID NO: 1626 - DNA, 20 bp, Homo sapiens
tcagggcctcagcctggccg

SEQ ID NO: 1627 - DNA, 20 bp, Homo sapiens
ctgcagtttgcccatccacg

SEQ ID NO: 1628 - DNA, 20 bp, Homo sapiens
ggcctgcagtttgcccatcc

SEQ ID NO: 1629 - DNA, 20 bp, Homo sapiens
ccaggcctgcagtttgccca

SEQ ID NO: 1630 - DNA, 20 bp, Homo sapiens
gccttcccaggcctgcagtt

SEQ ID NO: 1631 - DNA, 20 bp, Homo sapiens
gctgccttcccaggcctgca

SEQ ID NO: 1632 - DNA, 20 bp, Homo sapiens
cttgctgccttcccaggcct

SEQ ID NO: 1633 - DNA, 20 bp, Homo sapiens
gcccggcttgctgccttccc

SEQ ID NO: 1634 - DNA, 20 bp, Homo sapiens
acggcccggcttgctgcctt

SEQ ID NO: 1635 - DNA, 20 bp, Homo sapiens
cggacggcccggcttgctgc

SEQ ID NO: 1636 - DNA, 20 bp, Homo sapiens
acacggacggcccggcttgc

SEQ ID NO: 1637 - DNA, 20 bp, Homo sapiens
gatggaacacggacggcccg

SEQ ID NO: 1638 - DNA, 20 bp, Homo sapiens
gaggatggaacacggacggc

SEQ ID NO: 1639 - DNA, 20 bp, Homo sapiens
gtggaggatggaacacggac

SEQ ID NO: 1640 - DNA, 20 bp, Homo sapiens
gcgaaccaacgataggtggg

SEQ ID NO: 1641 - DNA, 20 bp, Homo sapiens
tttgcgaaccaacgataggt

SEQ ID NO: 1642 - DNA, 20 bp, Homo sapiens
gctttgcactttgcgaacca

SEQ ID NO: 1643 - DNA, 20 bp, Homo sapiens
aaagctttgcactttgcgaa

SEQ ID NO: 1644 - DNA, 20 bp, Homo sapiens
cacaagaaagctttgcactt

SEQ ID NO: 1645 - DNA, 20 bp, Homo sapiens
gtcatgcacaagaaagcttt

SEQ ID NO: 1646 - DNA, 20 bp, Homo sapiens
acgctccccagagcagggcg

SEQ ID NO: 1647 - DNA, 20 bp, Homo sapiens
gcagagatcgcgccagacgc

SEQ ID NO: 1648 - DNA, 20 bp, Homo sapiens
caggcagagatcgcgccaga

SEQ ID NO: 1649 - DNA, 20 bp, Homo sapiens
aagcaggcagagatcgcgcc

SEQ ID NO: 1650 - DNA, 20 bp, Homo sapiens
ccgagtaagcaggcagagat

SEQ ID NO: 1651 - DNA, 20 bp, Homo sapiens
ttcccgagtaagcaggcaga

SEQ ID NO: 1652 - DNA, 20 bp, Homo sapiens
gcaaatttcccgagtaagca

SEQ ID NO: 1653 - DNA, 20 bp, Homo sapiens
aaagcaaatttcccgagtaa

SEQ ID NO: 1654 - DNA, 20 bp, Homo sapiens
ttggcaaaagcaaatttccc

SEQ ID NO: 1655 - DNA, 20 bp, Homo sapiens
ggtttggcaaaagcaaattt

SEQ ID NO: 1656 - DNA, 20 bp, Homo sapiens
gcgggtttggcaaaagcaaa

SEQ ID NO: 1657 - DNA, 20 bp, Homo sapiens
aaagcgggtttggcaaaagc

SEQ ID NO: 1658 - DNA, 20 bp, Homo sapiens
cccgaaaaagcgggtttggc

SEQ ID NO: 1659 - DNA, 20 bp, Homo sapiens
atccccgaaaaagcgggttt

SEQ ID NO: 1660 - DNA, 20 bp, Homo sapiens
cgggatccccgaaaaagcgg

SEQ ID NO: 1661 - DNA, 20 bp, Homo sapiens
gcgcgggatccccgaaaaag

SEQ ID NO: 1662 - DNA, 20 bp, Homo sapiens
gagagcagcgcaagtgagga

SEQ ID NO: 1663 - DNA, 20 bp, Homo sapiens
tccgagagcagcgcaagtga

SEQ ID NO: 1664 - DNA, 20 bp, Homo sapiens
ggctccgagagcagcgcaag

SEQ ID NO: 1665 - DNA, 20 bp, Homo sapiens
aagcgggcggagccggctgg

SEQ ID NO: 1666 - DNA, 20 bp, Homo sapiens
ccgaagcgggcggagccggc

SEQ ID NO: 1667 - DNA, 20 bp, Homo sapiens
aaaccgccgaagcgggcgga

SEQ ID NO: 1668 - DNA, 20 bp, Homo sapiens
tccaaaccgccgaagcgggc

SEQ ID NO: 1669 - DNA, 20 bp, Homo sapiens
atatccaaaccgccgaagcg

SEQ ID NO: 1670 - DNA, 20 bp, Homo sapiens
taaatatccaaaccgccgaa

SEQ ID NO: 1671 - DNA, 20 bp, Homo sapiens
caataaatatccaaaccgcc

SEQ ID NO: 1672 - DNA, 20 bp, Homo sapiens
cgaggtcaataaatatccaa

SEQ ID NO: 1673 - DNA, 20 bp, Homo sapiens
ggacgaggtcaataaatatc

SEQ ID NO: 1674 - DNA, 20 bp, Homo sapiens
ggaggacgaggtcaataaat

SEQ ID NO: 1675 - DNA, 20 bp, Homo sapiens
cgagtcggaggacgaggtca

SEQ ID NO: 1676 - DNA, 20 bp, Homo sapiens
tgtcagcgagtcggaggacg

SEQ ID NO: 1677 - DNA, 20 bp, Homo sapiens
gcctgtcagcgagtcggagg

SEQ ID NO: 1678 - DNA, 20 bp, Homo sapiens
gtagcctgtcagcgagtcgg

SEQ ID NO: 1679 - DNA, 20 bp, Homo sapiens
cctgtagcctgtcagcgagt

SEQ ID NO: 1680 - DNA, 20 bp, Homo sapiens
ggtcctgtagcctgtcagcg

SEQ ID NO: 1681 - DNA, 20 bp, Homo sapiens
aaataccgaggaatgtcggg

SEQ ID NO: 1682 - DNA, 20 bp, Homo sapiens
aataaataccgaggaatgtc

SEQ ID NO: 1683 - DNA, 20 bp, Homo sapiens
gacaataaataccgaggaat

SEQ ID NO: 1684 - DNA, 20 bp, Homo sapiens
cggggccccggagtcgaaga

SEQ ID NO: 1685 - DNA, 20 bp, Homo sapiens
ccaacggggccccggagtcg

SEQ ID NO: 1686 - DNA, 20 bp, Homo sapiens
ttccaacggggccccggagt

SEQ ID NO: 1687 - DNA, 20 bp, Homo sapiens
gtcttccaacggggccccgg

SEQ ID NO: 1688 - DNA, 20 bp, Homo sapiens
cagtcttccaacggggcccc

SEQ ID NO: 1689 - DNA, 20 bp, Homo sapiens
ctcagtcttccaacggggcc

SEQ ID NO: 1690 - DNA, 20 bp, Homo sapiens
gcactcagtcttccaacggg

SEQ ID NO: 1691 - DNA, 20 bp, Homo sapiens
ccccgggcactcagtcttcc

SEQ ID NO: 1692 - DNA, 20 bp, Homo sapiens
tgccccgggcactcagtctt

SEQ ID NO: 1693 - DNA, 20 bp, Homo sapiens
cgtgccccgggcactcagtc

SEQ ID NO: 1694 - DNA, 20 bp, Homo sapiens
gtgccgtgccccgggcactc

SEQ ID NO: 1695 - DNA, 20 bp, Homo sapiens
tctgtgccgtgccccgggca

SEQ ID NO: 1696 - DNA, 20 bp, Homo sapiens
gcttctgtgccgtgccccgg

SEQ ID NO: 1697 - DNA, 20 bp, Homo sapiens
gcggcttctgtgccgtgccc

SEQ ID NO: 1698 - DNA, 20 bp, Homo sapiens
gcgcggcttctgtgccgtgc

SEQ ID NO: 1699 - DNA, 20 bp, Homo sapiens
gggcgcggcttctgtgccgt

SEQ ID NO: 1700 - DNA, 20 bp, Homo sapiens
ggcggtgggcgcggcttctg

SEQ ID NO: 1701 - DNA, 20 bp, Homo sapiens
ggcaggcggtgggcgcggct

SEQ ID NO: 1702 - DNA, 20 bp, Homo sapiens
ctggcaggcggtgggcgcgg

SEQ ID NO: 1703 - DNA, 20 bp, Homo sapiens
aactggcaggcggtgggcgc

SEQ ID NO: 1704 - DNA, 20 bp, Homo sapiens
gtgaactggcaggcggtggg

SEQ ID NO: 1705 - DNA, 20 bp, Homo sapiens
ggttgtgaactggcaggcgg

SEQ ID NO: 1706 - DNA, 20 bp, Homo sapiens
gcggttgtgaactggcaggc

SEQ ID NO: 1707 - DNA, 20 bp, Homo sapiens
cgctcggagcggttgtgaac

SEQ ID NO: 1708 - DNA, 20 bp, Homo sapiens
cccacgctcggagcggttgt

SEQ ID NO: 1709 - DNA, 20 bp, Homo sapiens
agacccacgctcggagcggt

SEQ ID NO: 1710 - DNA, 20 bp, Homo sapiens
cggagacccacgctcggagc

SEQ ID NO: 1711 - DNA, 20 bp, Homo sapiens
gggcggagacccacgctcgg

SEQ ID NO: 1712 - DNA, 20 bp, Homo sapiens
gctgggcggagacccacgct

SEQ ID NO: 1713 - DNA, 20 bp, Homo sapiens
ggagctgggcggagacccac

SEQ ID NO: 1714 - DNA, 20 bp, Homo sapiens
ctggagctgggcggagaccc

SEQ ID NO: 1715 - DNA, 20 bp, Homo sapiens
ggactggagctgggcggaga

SEQ ID NO: 1716 - DNA, 20 bp, Homo sapiens
caggactggagctgggcgga

SEQ ID NO: 1717 - DNA, 20 bp, Homo sapiens
atcacaggactggagctggg

SEQ ID NO: 1718 - DNA, 20 bp, Homo sapiens
gggcgggcccggatcacagg

SEQ ID NO: 1719 - DNA, 20 bp, Homo sapiens
gggggcgggcccggatcaca

SEQ ID NO: 1720 - DNA, 20 bp, Homo sapiens
aggcagcaccatggcccctc

SEQ ID NO: 1721 - DNA, 20 bp, Homo sapiens
ggtccaacaccagctgctgg

SEQ ID NO: 1722 - DNA, 20 bp, Homo sapiens
cgatcaccttcagaatctcg

SEQ ID NO: 1723 - DNA, 20 bp, Homo sapiens
cttgttcatgatcttcatgg

SEQ ID NO: 1724 - DNA, 20 bp, Homo sapiens
ccccattcaccaacacgtcc

SEQ ID NO: 1725 - DNA, 20 bp, Homo sapiens
gcgtgatccaccgccggtcc

SEQ ID NO: 1726 - DNA, 20 bp, Homo sapiens
gtaatactccatgaccaggt

SEQ ID NO: 1727 - DNA, 20 bp, Homo sapiens
gcagtgtcagcaggtccccg

SEQ ID NO: 1728 - DNA, 20 bp, Homo sapiens
caccgagtctatggccatga

SEQ ID NO: 1729 - DNA, 20 bp, Homo sapiens
acgtagccaagccggtgcac

SEQ ID NO: 1730 - DNA, 20 bp, Homo sapiens
atgtggccacagcggtccag

SEQ ID NO: 1731 - DNA, 20 bp, Homo sapiens
cttcgtccaccagcggcaga

SEQ ID NO: 1732 - DNA, 20 bp, Homo sapiens
gaccccttcgtccaccagcg

SEQ ID NO: 1733 - DNA, 20 bp, Homo sapiens
cctgctccaccccggcccag

SEQ ID NO: 1734 - DNA, 20 bp, Homo sapiens
cggaagtcgcctgctccacc

SEQ ID NO: 1735 - DNA, 20 bp, Homo sapiens
cggagaccatcccagtcgag

SEQ ID NO: 1736 - DNA, 20 bp, Homo sapiens
tgagggccatgcaggagtag

SEQ ID NO: 1737 - DNA, 20 bp, Homo sapiens
ctccagttccatgggtgtgg

SEQ ID NO: 1738 - DNA, 20 bp, Homo sapiens
gcgcttgcacgtgtggctca

SEQ ID NO: 1739 - DNA, 20 bp, Homo sapiens
gccacttcagctgtttcatc

SEQ ID NO: 1740 - DNA, 20 bp, Homo sapiens
gcctcagcctctgccgcagg

SEQ ID NO: 1741 - DNA, 20 bp, Homo sapiens
gcagcgtcacctcggcctca

SEQ ID NO: 1742 - DNA, 20 bp, Homo sapiens
ggctcaggctctgccgggtg

SEQ ID NO: 1743 - DNA, 20 bp, Homo sapiens
ttccgagcctctgcctcgcg

SEQ ID NO: 1744 - DNA, 20 bp, Homo sapiens
ggtcccggttccgagcctct

SEQ ID NO: 1745 - DNA, 20 bp, Homo sapiens
atccgctcctgcaactgccg

SEQ ID NO: 1746 - DNA, 20 bp, Homo sapiens
gcaactccatccgctcctgc

SEQ ID NO: 1747 - DNA, 20 bp, Homo sapiens
aggtggatccgtggcccggg

SEQ ID NO: 1748 - DNA, 20 bp, Homo sapiens
cgcggcttctgtgccgtgcc

SEQ ID NO: 1749 - DNA, 20 bp, Homo sapiens
ttgctgccttcccaggcctg

SEQ ID NO: 1750 - DNA, 20 bp, Homo sapiens
cactgagggccagacatatg

SEQ ID NO: 1751 - DNA, 20 bp, Homo sapiens
ctctagattcagatgcaggt

SEQ ID NO: 1752 - DNA, 20 bp, Homo sapiens
gcctggcagcccctgtccag

SEQ ID NO: 1753 - DNA, 20 bp, Homo sapiens
ggcctggcagcccctgtcca

SEQ ID NO: 1754 - DNA, 20 bp, Homo sapiens
gggcctggcagcccctgtcc

SEQ ID NO: 1755 - DNA, 20 bp, Homo sapiens
atggcccctccccgggccgg

SEQ ID NO: 1756 - DNA, 20 bp, Homo sapiens
catggcccctccccgggccg

SEQ ID NO: 1757 - DNA, 20 bp, Homo sapiens
ccatggcccctccccgggcc

SEQ ID NO: 1758 - DNA, 20 bp, Homo sapiens
accatggcccctccccgggc

SEQ ID NO: 1759 - DNA, 20 bp, Homo sapiens
caccatggcccctccccggg

SEQ ID NO: 1760 - DNA, 20 bp, Homo sapiens
gcaccatggcccctccccgg

SEQ ID NO: 1761 - DNA, 20 bp, Homo sapiens
agcaccatggcccctccccg

SEQ ID NO: 1762 - DNA, 20 bp, Homo sapiens
cagcaccatggcccctcccc

SEQ ID NO: 1763 - DNA, 20 bp, Homo sapiens
gcagcaccatggcccctccc

SEQ ID NO: 1764 - DNA, 20 bp, Homo sapiens
ggcagcaccatggcccctcc

SEQ ID NO: 1765 - DNA, 20 bp, Homo sapiens
caggcagcaccatggcccct

SEQ ID NO: 1766 - DNA, 20 bp, Homo sapiens
acaggcagcaccatggcccc

SEQ ID NO: 1767 - DNA, 20 bp, Homo sapiens
ggacaggcagcaccatggcc

SEQ ID NO: 1768 - DNA, 20 bp, Homo sapiens
tggacaggcagcaccatggc

SEQ ID NO: 1769 - DNA, 20 bp, Homo sapiens
ttggacaggcagcaccatgg

SEQ ID NO: 1770 - DNA, 20 bp, Homo sapiens
gttggacaggcagcaccatg

SEQ ID NO: 1771 - DNA, 20 bp, Homo sapiens
tgttggacaggcagcaccat

SEQ ID NO: 1772 - DNA, 20 bp, Homo sapiens
atgttggacaggcagcacca

SEQ ID NO: 1773 - DNA, 20 bp, Homo sapiens
catgttggacaggcagcacc

SEQ ID NO: 1774 - DNA, 20 bp, Homo sapiens
acatgttggacaggcagcac

SEQ ID NO: 1775 - DNA, 20 bp, Homo sapiens
gacatgttggacaggcagca

SEQ ID NO: 1776 - DNA, 20 bp, Homo sapiens
tgacatgttggacaggcagc

SEQ ID NO: 1777 - DNA, 20 bp, Homo sapiens
ctgacatgttggacaggcag

SEQ ID NO: 1778 - DNA, 20 bp, Homo sapiens
gctgacatgttggacaggca

SEQ ID NO: 1779 - DNA, 20 bp, Homo sapiens
ggctgacatgttggacaggc

SEQ ID NO: 1780 - DNA, 20 bp, Homo sapiens
cggctgacatgttggacagg

SEQ ID NO: 1781 - DNA, 20 bp, Homo sapiens
tcggctgacatgttggacag

SEQ ID NO: 1782 - DNA, 20 bp, Homo sapiens
ctcggctgacatgttggaca

SEQ ID NO: 1783 - DNA, 20 bp, Homo sapiens
cctcggctgacatgttggac

SEQ ID NO: 1784 - DNA, 20 bp, Homo sapiens
acctcggctgacatgttgga

SEQ ID NO: 1785 - DNA, 20 bp, Homo sapiens
cacctcggctgacatgttgg

SEQ ID NO: 1786 - DNA, 20 bp, Homo sapiens
gcacctcggctgacatgttg

SEQ ID NO: 1787 - DNA, 20 bp, Homo sapiens
cgcacctcggctgacatgtt

SEQ ID NO: 1788 - DNA, 20 bp, Homo sapiens
ccgcacctcggctgacatgt

SEQ ID NO: 1789 - DNA, 20 bp, Homo sapiens
gccgcacctcggctgacatg

SEQ ID NO: 1790 - DNA, 20 bp, Homo sapiens
agccgcacctcggctgacat

SEQ ID NO: 1791 - DNA, 20 bp, Homo sapiens
cagccgcacctcggctgaca

SEQ ID NO: 1792 - DNA, 20 bp, Homo sapiens
tcagccgcacctcggctgac

SEQ ID NO: 1793 - DNA, 20 bp, Homo sapiens
ctcagccgcacctcggctga

SEQ ID NO: 1794 - DNA, 20 bp, Homo sapiens
cctcagccgcacctcggctg

SEQ ID NO: 1795 - DNA, 20 bp, Homo sapiens
gcctcagccgcacctcggct

SEQ ID NO: 1796 - DNA, 20 bp, Homo sapiens
ccaacaccagctgctggagc

SEQ ID NO: 1797 - DNA, 20 bp, Homo sapiens
tccaacaccagctgctggag

SEQ ID NO: 1798 - DNA, 20 bp, Homo sapiens
gtccaacaccagctgctgga

SEQ ID NO: 1799 - DNA, 20 bp, Homo sapiens
gggtccaacaccagctgctg

SEQ ID NO: 1800 - DNA, 20 bp, Homo sapiens
ggctccagccccaggaagcc

SEQ ID NO: 1801 - DNA, 20 bp, Homo sapiens
gggctccagccccaggaagc

SEQ ID NO: 1802 - DNA, 20 bp, Homo sapiens
caggagaaggtcgagcaggg

SEQ ID NO: 1803 - DNA, 20 bp, Homo sapiens
cccaggagaaggtcgagcag

SEQ ID NO: 1804 - DNA, 20 bp, Homo sapiens
gcccaggagaaggtcgagca

SEQ ID NO: 1805 - DNA, 20 bp, Homo sapiens
cgcccaggagaaggtcgagc

SEQ ID NO: 1806 - DNA, 20 bp, Homo sapiens
acgcccaggagaaggtcgag

SEQ ID NO: 1807 - DNA, 20 bp, Homo sapiens
tcctgggccagttcggaggc

SEQ ID NO: 1808 - DNA, 20 bp, Homo sapiens
gtcctgggccagttcggagg

SEQ ID NO: 1809 - DNA, 20 bp, Homo sapiens
tgtcctgggccagttcggag

SEQ ID NO: 1810 - DNA, 20 bp, Homo sapiens
ttgtcctgggccagttcgga

SEQ ID NO: 1811 - DNA, 20 bp, Homo sapiens
cttgtcctgggccagttcgg

SEQ ID NO: 1812 - DNA, 20 bp, Homo sapiens
acttgtcctgggccagttcg

SEQ ID NO: 1813 - DNA, 20 bp, Homo sapiens
tacttgtcctgggccagttc

SEQ ID NO: 1814 - DNA, 20 bp, Homo sapiens
gtacttgtcctgggccagtt

SEQ ID NO: 1815 - DNA, 20 bp, Homo sapiens
cgtacttgtcctgggccagt

SEQ ID NO: 1816 - DNA, 20 bp, Homo sapiens
actgcaagaagtcggccacg

SEQ ID NO: 1817 - DNA, 20 bp, Homo sapiens
ccactgcaagaagtcggcca

SEQ ID NO: 1818 - DNA, 20 bp, Homo sapiens
cccactgcaagaagtcggcc

SEQ ID NO: 1819 - DNA, 20 bp, Homo sapiens
gcccactgcaagaagtcggc

SEQ ID NO: 1820 - DNA, 20 bp, Homo sapiens
cgcccactgcaagaagtcgg

SEQ ID NO: 1821 - DNA, 20 bp, Homo sapiens
ccgcccactgcaagaagtcg

SEQ ID NO: 1822 - DNA, 20 bp, Homo sapiens
tccgcccactgcaagaagtc

SEQ ID NO: 1823 - DNA, 20 bp, Homo sapiens
ctccgcccactgcaagaagt

SEQ ID NO: 1824 - DNA, 20 bp, Homo sapiens
gctccgcccactgcaagaag

SEQ ID NO: 1825 - DNA, 20 bp, Homo sapiens
ggctccgcccactgcaagaa

SEQ ID NO: 1826 - DNA, 20 bp, Homo sapiens
gggctccgcccactgcaaga

SEQ ID NO: 1827 - DNA, 20 bp, Homo sapiens
tgggctccgcccactgcaag

SEQ ID NO: 1828 - DNA, 20 bp, Homo sapiens
atgggctccgcccactgcaa

SEQ ID NO: 1829 - DNA, 20 bp, Homo sapiens
gatgggctccgcccactgca

SEQ ID NO: 1830 - DNA, 20 bp, Homo sapiens
cgatgggctccgcccactgc

SEQ ID NO: 1831 - DNA, 20 bp, Homo sapiens
acgatgggctccgcccactg

SEQ ID NO: 1832 - DNA, 20 bp, Homo sapiens
cacgatgggctccgcccact

SEQ ID NO: 1833 - DNA, 20 bp, Homo sapiens
ccacgatgggctccgcccac

SEQ ID NO: 1834 - DNA, 20 bp, Homo sapiens
accacgatgggctccgccca

SEQ ID NO: 1835 - DNA, 20 bp, Homo sapiens
caccacgatgggctccgccc

SEQ ID NO: 1836 - DNA, 20 bp, Homo sapiens
tcaccacgatgggctccgcc

SEQ ID NO: 1837 - DNA, 20 bp, Homo sapiens
ctcaccacgatgggctccgc

SEQ ID NO: 1838 - DNA, 20 bp, Homo sapiens
cctcaccacgatgggctccg

SEQ ID NO: 1839 - DNA, 20 bp, Homo sapiens
gcctcaccacgatgggctcc

SEQ ID NO: 1840 - DNA, 20 bp, Homo sapiens
agcctcaccacgatgggctc

SEQ ID NO: 1841 - DNA, 20 bp, Homo sapiens
aagcctcaccacgatgggct

SEQ ID NO: 1842 - DNA, 20 bp, Homo sapiens
taagcctcaccacgatgggc

SEQ ID NO: 1843 - DNA, 20 bp, Homo sapiens
ttaagcctcaccacgatggg

SEQ ID NO: 1844 - DNA, 20 bp, Homo sapiens
cttaagcctcaccacgatgg

SEQ ID NO: 1845 - DNA, 20 bp, Homo sapiens
ccttaagcctcaccacgatg

SEQ ID NO: 1846 - DNA, 20 bp, Homo sapiens
tccttaagcctcaccacgat

SEQ ID NO: 1847 - DNA, 20 bp, Homo sapiens
ctccttaagcctcaccacga

SEQ ID NO: 1848 - DNA, 20 bp, Homo sapiens
cctccttaagcctcaccacg

SEQ ID NO: 1849 - DNA, 20 bp, Homo sapiens
acctccttaagcctcaccac

SEQ ID NO: 1850 - DNA, 20 bp, Homo sapiens
gacctccttaagcctcacca

SEQ ID NO: 1851 - DNA, 20 bp, Homo sapiens
ggacctccttaagcctcacc

SEQ ID NO: 1852 - DNA, 20 bp, Homo sapiens
cggacctccttaagcctcac

SEQ ID NO: 1853 - DNA, 20 bp, Homo sapiens
tcggacctccttaagcctca

SEQ ID NO: 1854 - DNA, 20 bp, Homo sapiens
gtcggacctccttaagcctc

SEQ ID NO: 1855 - DNA, 20 bp, Homo sapiens
cagtcggacctccttaagcc

SEQ ID NO: 1856 - DNA, 20 bp, Homo sapiens
gcagtcggacctccttaagc

SEQ ID NO: 1857 - DNA, 20 bp, Homo sapiens
tgcagtcggacctccttaag

SEQ ID NO: 1858 - DNA, 20 bp, Homo sapiens
ccttcagaatctcgaagtcg

SEQ ID NO: 1859 - DNA, 20 bp, Homo sapiens
accttcagaatctcgaagtc

SEQ ID NO: 1860 - DNA, 20 bp, Homo sapiens
tcaccttcagaatctcgaag

SEQ ID NO: 1861 - DNA, 20 bp, Homo sapiens
atcaccttcagaatctcgaa

SEQ ID NO: 1862 - DNA, 20 bp, Homo sapiens
gatcaccttcagaatctcga

SEQ ID NO: 1863 - DNA, 20 bp, Homo sapiens
ccgatcaccttcagaatctc

SEQ ID NO: 1864 - DNA, 20 bp, Homo sapiens
tccgatcaccttcagaatct

SEQ ID NO: 1865 - DNA, 20 bp, Homo sapiens
gtccgatcaccttcagaatc

SEQ ID NO: 1866 - DNA, 20 bp, Homo sapiens
cgtccgatcaccttcagaat

SEQ ID NO: 1867 - DNA, 20 bp, Homo sapiens
cccgtctgcttcatcttcac

SEQ ID NO: 1868 - DNA, 20 bp, Homo sapiens
gcccgtctgcttcatcttca

SEQ ID NO: 1869 - DNA, 20 bp, Homo sapiens
ggcccgtctgcttcatcttc

SEQ ID NO: 1870 - DNA, 20 bp, Homo sapiens
tggcccgtctgcttcatctt

SEQ ID NO: 1871 - DNA, 20 bp, Homo sapiens
ctggcccgtctgcttcatct

SEQ ID NO: 1872 - DNA, 20 bp, Homo sapiens
cctggcccgtctgcttcatc

SEQ ID NO: 1873 - DNA, 20 bp, Homo sapiens
acctggcccgtctgcttcat

SEQ ID NO: 1874 - DNA, 20 bp, Homo sapiens
cacctggcccgtctgcttca

SEQ ID NO: 1875 - DNA, 20 bp, Homo sapiens
acacctggcccgtctgcttc

SEQ ID NO: 1876 - DNA, 20 bp, Homo sapiens
tacacctggcccgtctgctt

SEQ ID NO: 1877 - DNA, 20 bp, Homo sapiens
ttgttcatgatcttcatggc

SEQ ID NO: 1878 - DNA, 20 bp, Homo sapiens
acttgttcatgatcttcatg

SEQ ID NO: 1879 - DNA, 20 bp, Homo sapiens
cacttgttcatgatcttcat

SEQ ID NO: 1880 - DNA, 20 bp, Homo sapiens
ccacttgttcatgatcttca

SEQ ID NO: 1881 - DNA, 20 bp, Homo sapiens
cccacttgttcatgatcttc

SEQ ID NO: 1882 - DNA, 20 bp, Homo sapiens
tcccacttgttcatgatctt

SEQ ID NO: 1883 - DNA, 20 bp, Homo sapiens
gtcccacttgttcatgatct

SEQ ID NO: 1884 - DNA, 20 bp, Homo sapiens
tgtcccacttgttcatgatc

SEQ ID NO: 1885 - DNA, 20 bp, Homo sapiens
atgtcccacttgttcatgat

SEQ ID NO: 1886 - DNA, 20 bp, Homo sapiens
catgtcccacttgttcatga

SEQ ID NO: 1887 - DNA, 20 bp, Homo sapiens
gcatgtcccacttgttcatg

SEQ ID NO: 1888 - DNA, 20 bp, Homo sapiens
agcatgtcccacttgttcat

SEQ ID NO: 1889 - DNA, 20 bp, Homo sapiens
cagcatgtcccacttgttca

SEQ ID NO: 1890 - DNA, 20 bp, Homo sapiens
tcagcatgtcccacttgttc

SEQ ID NO: 1891 - DNA, 20 bp, Homo sapiens
ttcagcatgtcccacttgtt

SEQ ID NO: 1892 - DNA, 20 bp, Homo sapiens
cttcagcatgtcccacttgt

SEQ ID NO: 1893 - DNA, 20 bp, Homo sapiens
tcttcagcatgtcccacttg

SEQ ID NO: 1894 - DNA, 20 bp, Homo sapiens
cctcttcagcatgtcccact

SEQ ID NO: 1895 - DNA, 20 bp, Homo sapiens
ccctcttcagcatgtcccac

SEQ ID NO: 1896 - DNA, 20 bp, Homo sapiens
cccctcttcagcatgtccca

SEQ ID NO: 1897 - DNA, 20 bp, Homo sapiens
gcccctcttcagcatgtccc

SEQ ID NO: 1898 - DNA, 20 bp, Homo sapiens
cgcccctcttcagcatgtcc

SEQ ID NO: 1899 - DNA, 20 bp, Homo sapiens
tcgcccctcttcagcatgtc

SEQ ID NO: 1900 - DNA, 20 bp, Homo sapiens
ctcgcccctcttcagcatgt

SEQ ID NO: 1901 - DNA, 20 bp, Homo sapiens
cctcgcccctcttcagcatg

SEQ ID NO: 1902 - DNA, 20 bp, Homo sapiens
acctcgcccctcttcagcat

SEQ ID NO: 1903 - DNA, 20 bp, Homo sapiens
cacctcgcccctcttcagca

SEQ ID NO: 1904 - DNA, 20 bp, Homo sapiens
acacctcgcccctcttcagc

SEQ ID NO: 1905 - DNA, 20 bp, Homo sapiens
gacacctcgcccctcttcag

SEQ ID NO: 1906 - DNA, 20 bp, Homo sapiens
gccaggcggatgtggccaca

SEQ ID NO: 1907 - DNA, 20 bp, Homo sapiens
accgcaccgttccatctgcc

SEQ ID NO: 1908 - DNA, 20 bp, Homo sapiens
gaccgcaccgttccatctgc

SEQ ID NO: 1909 - DNA, 20 bp, Homo sapiens
acagcctgcaggatctcggg

SEQ ID NO: 1910 - DNA, 20 bp, Homo sapiens
cacagcctgcaggatctcgg

SEQ ID NO: 1911 - DNA, 20 bp, Homo sapiens
ccacagcctgcaggatctcg

SEQ ID NO: 1912 - DNA, 20 bp, Homo sapiens
cccacagcctgcaggatctc

SEQ ID NO: 1913 - DNA, 20 bp, Homo sapiens
gcccacagcctgcaggatct

SEQ ID NO: 1914 - DNA, 20 bp, Homo sapiens
cgcccacagcctgcaggatc

SEQ ID NO: 1915 - DNA, 20 bp, Homo sapiens
ccgcccacagcctgcaggat

SEQ ID NO: 1916 - DNA, 20 bp, Homo sapiens
accgcccacagcctgcagga

SEQ ID NO: 1917 - DNA, 20 bp, Homo sapiens
caccgcccacagcctgcagg

SEQ ID NO: 1918 - DNA, 20 bp, Homo sapiens
ccaccgcccacagcctgcag

SEQ ID NO: 1919 - DNA, 20 bp, Homo sapiens
cccaccgcccacagcctgca

SEQ ID NO: 1920 - DNA, 20 bp, Homo sapiens
gcccaccgcccacagcctgc

SEQ ID NO: 1921 - DNA, 20 bp, Homo sapiens
ggcccaccgcccacagcctg

SEQ ID NO: 1922 - DNA, 20 bp, Homo sapiens
aggcccaccgcccacagcct

SEQ ID NO: 1923 - DNA, 20 bp, Homo sapiens
caggcccaccgcccacagcc

SEQ ID NO: 1924 - DNA, 20 bp, Homo sapiens
ccaggcccaccgcccacagc

SEQ ID NO: 1925 - DNA, 20 bp, Homo sapiens
cccaggcccaccgcccacag

SEQ ID NO: 1926 - DNA, 20 bp, Homo sapiens
tcccaggcccaccgcccaca

SEQ ID NO: 1927 - DNA, 20 bp, Homo sapiens
gtcccaggcccaccgcccac

SEQ ID NO: 1928 - DNA, 20 bp, Homo sapiens
tgtcccaggcccaccgccca

SEQ ID NO: 1929 - DNA, 20 bp, Homo sapiens
ctgtcccaggcccaccgccc

SEQ ID NO: 1930 - DNA, 20 bp, Homo sapiens
cctgtcccaggcccaccgcc

SEQ ID NO: 1931 - DNA, 20 bp, Homo sapiens
gcctgtcccaggcccaccgc

SEQ ID NO: 1932 - DNA, 20 bp, Homo sapiens
tgcctgtcccaggcccaccg

SEQ ID NO: 1933 - DNA, 20 bp, Homo sapiens
ctgcctgtcccaggcccacc

SEQ ID NO: 1934 - DNA, 20 bp, Homo sapiens
gctgcctgtcccaggcccac

SEQ ID NO: 1935 - DNA, 20 bp, Homo sapiens
agctgcctgtcccaggccca

SEQ ID NO: 1936 - DNA, 20 bp, Homo sapiens
tagctgcctgtcccaggccc

SEQ ID NO: 1937 - DNA, 20 bp, Homo sapiens
gtagctgcctgtcccaggcc

SEQ ID NO: 1938 - DNA, 20 bp, Homo sapiens
cgtagctgcctgtcccaggc

SEQ ID NO: 1939 - DNA, 20 bp, Homo sapiens
ccgtagctgcctgtcccagg

SEQ ID NO: 1940 - DNA, 20 bp, Homo sapiens
cccgtagctgcctgtcccag

SEQ ID NO: 1941 - DNA, 20 bp, Homo sapiens
gcccgtagctgcctgtccca

SEQ ID NO: 1942 - DNA, 20 bp, Homo sapiens
ggcccgtagctgcctgtccc

SEQ ID NO: 1943 - DNA, 20 bp, Homo sapiens
tagaacatttcataggcgaa

SEQ ID NO: 1944 - DNA, 20 bp, Homo sapiens
tctccgccgtggaatccgcg

SEQ ID NO: 1945 - DNA, 20 bp, Homo sapiens
gtctccgccgtggaatccgc

SEQ ID NO: 1946 - DNA, 20 bp, Homo sapiens
ggtctccgccgtggaatccg

SEQ ID NO: 1947 - DNA, 20 bp, Homo sapiens
aggtctccgccgtggaatcc

SEQ ID NO: 1948 - DNA, 20 bp, Homo sapiens
taggtctccgccgtggaatc

SEQ ID NO: 1949 - DNA, 20 bp, Homo sapiens
ttgtagtggacgatcttgcc

SEQ ID NO: 1950 - DNA, 20 bp, Homo sapiens
cttgtagtggacgatcttgc

SEQ ID NO: 1951 - DNA, 20 bp, Homo sapiens
ccttgtagtggacgatcttg

SEQ ID NO: 1952 - DNA, 20 bp, Homo sapiens
tccttgtagtggacgatctt

SEQ ID NO: 1953 - DNA, 20 bp, Homo sapiens
ctccttgtagtggacgatct

SEQ ID NO: 1954 - DNA, 20 bp, Homo sapiens
gctccttgtagtggacgatc

SEQ ID NO: 1955 - DNA, 20 bp, Homo sapiens
tgctccttgtagtggacgat

SEQ ID NO: 1956 - DNA, 20 bp, Homo sapiens
gtgctccttgtagtggacga

SEQ ID NO: 1957 - DNA, 20 bp, Homo sapiens
ggtgctccttgtagtggacg

SEQ ID NO: 1958 - DNA, 20 bp, Homo sapiens
aggtgctccttgtagtggac

SEQ ID NO: 1959 - DNA, 20 bp, Homo sapiens
gaggtgctccttgtagtgga

SEQ ID NO: 1960 - DNA, 20 bp, Homo sapiens
agaggtgctccttgtagtgg

SEQ ID NO: 1961 - DNA, 20 bp, Homo sapiens
gagaggtgctccttgtagtg

SEQ ID NO: 1962 - DNA, 20 bp, Homo sapiens
agagaggtgctccttgtagt

SEQ ID NO: 1963 - DNA, 20 bp, Homo sapiens
gagagaggtgctccttgtag

SEQ ID NO: 1964 - DNA, 20 bp, Homo sapiens
agagagaggtgctccttgta

SEQ ID NO: 1965 - DNA, 20 bp, Homo sapiens
cagagagaggtgctccttgt

SEQ ID NO: 1966 - DNA, 20 bp, Homo sapiens
ggcagagagaggtgctcctt

SEQ ID NO: 1967 - DNA, 20 bp, Homo sapiens
cggcagagagaggtgctcct

SEQ ID NO: 1968 - DNA, 20 bp, Homo sapiens
gcggcagagagaggtgctcc

SEQ ID NO: 1969 - DNA, 20 bp, Homo sapiens
agcggcagagagaggtgctc

SEQ ID NO: 1970 - DNA, 20 bp, Homo sapiens
cagcggcagagagaggtgct

SEQ ID NO: 1971 - DNA, 20 bp, Homo sapiens
ccagcggcagagagaggtgc

SEQ ID NO: 1972 - DNA, 20 bp, Homo sapiens
ggcccagccgtgtctccggg

SEQ ID NO: 1973 - DNA, 20 bp, Homo sapiens
cggcccagccgtgtctccgg

SEQ ID NO: 1974 - DNA, 20 bp, Homo sapiens
ccggcccagccgtgtctccg

SEQ ID NO: 1975 - DNA, 20 bp, Homo sapiens
cccggcccagccgtgtctcc

SEQ ID NO: 1976 - DNA, 20 bp, Homo sapiens
ccccggcccagccgtgtctc

SEQ ID NO: 1977 - DNA, 20 bp, Homo sapiens
accccggcccagccgtgtct

SEQ ID NO: 1978 - DNA, 20 bp, Homo sapiens
caccccggcccagccgtgtc

SEQ ID NO: 1979 - DNA, 20 bp, Homo sapiens
ccaccccggcccagccgtgt

SEQ ID NO: 1980 - DNA, 20 bp, Homo sapiens
tccaccccggcccagccgtg

SEQ ID NO: 1981 - DNA, 20 bp, Homo sapiens
ctccaccccggcccagccgt

SEQ ID NO: 1982 - DNA, 20 bp, Homo sapiens
gctccaccccggcccagccg

SEQ ID NO: 1983 - DNA, 20 bp, Homo sapiens
tgctccaccccggcccagcc

SEQ ID NO: 1984 - DNA, 20 bp, Homo sapiens
ctgctccaccccggcccagc

SEQ ID NO: 1985 - DNA, 20 bp, Homo sapiens
aagggatgtgtccggaagtc

SEQ ID NO: 1986 - DNA, 20 bp, Homo sapiens
gaagggatgtgtccggaagt

SEQ ID NO: 1987 - DNA, 20 bp, Homo sapiens
agaagggatgtgtccggaag

SEQ ID NO: 1988 - DNA, 20 bp, Homo sapiens
aagaagggatgtgtccggaa

SEQ ID NO: 1989 - DNA, 20 bp, Homo sapiens
gaagaagggatgtgtccgga

SEQ ID NO: 1990 - DNA, 20 bp, Homo sapiens
agaagaagggatgtgtccgg

SEQ ID NO: 1991 - DNA, 20 bp, Homo sapiens
aagaagaagggatgtgtccg

SEQ ID NO: 1992 - DNA, 20 bp, Homo sapiens
aaagaagaagggatgtgtcc

SEQ ID NO: 1993 - DNA, 20 bp, Homo sapiens
caaagaagaagggatgtgtc

SEQ ID NO: 1994 - DNA, 20 bp, Homo sapiens
ccaaagaagaagggatgtgt

SEQ ID NO: 1995 - DNA, 20 bp, Homo sapiens
ggccaaagaagaagggatgt

SEQ ID NO: 1996 - DNA, 20 bp, Homo sapiens
aggccaaagaagaagggatg

SEQ ID NO: 1997 - DNA, 20 bp, Homo sapiens
gaggccaaagaagaagggat

SEQ ID NO: 1998 - DNA, 20 bp, Homo sapiens
cgaggccaaagaagaaggga

SEQ ID NO: 1999 - DNA, 20 bp, Homo sapiens
tcgaggccaaagaagaaggg

SEQ ID NO: 2000 - DNA, 20 bp, Homo sapiens
gtcgaggccaaagaagaagg

SEQ ID NO: 2001 - DNA, 20 bp, Homo sapiens
agtcgaggccaaagaagaag

SEQ ID NO: 2002 - DNA, 20 bp, Homo sapiens
cagtcgaggccaaagaagaa

SEQ ID NO: 2003 - DNA, 20 bp, Homo sapiens
ccagtcgaggccaaagaaga

SEQ ID NO: 2004 - DNA, 20 bp, Homo sapiens
cccagtcgaggccaaagaag

SEQ ID NO: 2005 - DNA, 20 bp, Homo sapiens
tcccagtcgaggccaaagaa

SEQ ID NO: 2006 - DNA, 20 bp, Homo sapiens
atcccagtcgaggccaaaga

SEQ ID NO: 2007 - DNA, 20 bp, Homo sapiens
catcccagtcgaggccaaag

SEQ ID NO: 2008 - DNA, 20 bp, Homo sapiens
ccatcccagtcgaggccaaa

SEQ ID NO: 2009 - DNA, 20 bp, Homo sapiens
accatcccagtcgaggccaa

SEQ ID NO: 2010 - DNA, 20 bp, Homo sapiens
gaccatcccagtcgaggcca

SEQ ID NO: 2011 - DNA, 20 bp, Homo sapiens
agaccatcccagtcgaggcc

SEQ ID NO: 2012 - DNA, 20 bp, Homo sapiens
gagaccatcccagtcgaggc

SEQ ID NO: 2013 - DNA, 20 bp, Homo sapiens
ggagaccatcccagtcgagg

SEQ ID NO: 2014 - DNA, 20 bp, Homo sapiens
ttcgaaatccggtgtaaagg

SEQ ID NO: 2015 - DNA, 20 bp, Homo sapiens
cttcgaaatccggtgtaaag

SEQ ID NO: 2016 - DNA, 20 bp, Homo sapiens
ccttcgaaatccggtgtaaa

SEQ ID NO: 2017 - DNA, 20 bp, Homo sapiens
accttcgaaatccggtgtaa

SEQ ID NO: 2018 - DNA, 20 bp, Homo sapiens
caccttcgaaatccggtgta

SEQ ID NO: 2019 - DNA, 20 bp, Homo sapiens
gcaccttcgaaatccggtgt

SEQ ID NO: 2020 - DNA, 20 bp, Homo sapiens
ggcaccttcgaaatccggtg

SEQ ID NO: 2021 - DNA, 20 bp, Homo sapiens
tggcaccttcgaaatccggt

SEQ ID NO: 2022 - DNA, 20 bp, Homo sapiens
gtggcaccttcgaaatccgg

SEQ ID NO: 2023 - DNA, 20 bp, Homo sapiens
ggtggcaccttcgaaatccg

SEQ ID NO: 2024 - DNA, 20 bp, Homo sapiens
cggtggcaccttcgaaatcc

SEQ ID NO: 2025 - DNA, 20 bp, Homo sapiens
tcggtggcaccttcgaaatc

SEQ ID NO: 2026 - DNA, 20 bp, Homo sapiens
gtcggtggcaccttcgaaat

SEQ ID NO: 2027 - DNA, 20 bp, Homo sapiens
tgtcggtggcaccttcgaaa

SEQ ID NO: 2028 - DNA, 20 bp, Homo sapiens
gtgtcggtggcaccttcgaa

SEQ ID NO: 2029 - DNA, 20 bp, Homo sapiens
tgtgtcggtggcaccttcga

SEQ ID NO: 2030 - DNA, 20 bp, Homo sapiens
atgtgtcggtggcaccttcg

SEQ ID NO: 2031 - DNA, 20 bp, Homo sapiens
catgtgtcggtggcaccttc

SEQ ID NO: 2032 - DNA, 20 bp, Homo sapiens
gcatgtgtcggtggcacctt

SEQ ID NO: 2033 - DNA, 20 bp, Homo sapiens
tgcatgtgtcggtggcacct

SEQ ID NO: 2034 - DNA, 20 bp, Homo sapiens
ttgcatgtgtcggtggcacc

SEQ ID NO: 2035 - DNA, 20 bp, Homo sapiens
gttgcatgtgtcggtggcac

SEQ ID NO: 2036 - DNA, 20 bp, Homo sapiens
agttgcatgtgtcggtggca

SEQ ID NO: 2037 - DNA, 20 bp, Homo sapiens
aagttgcatgtgtcggtggc

SEQ ID NO: 2038 - DNA, 20 bp, Homo sapiens
gaagttgcatgtgtcggtgg

SEQ ID NO: 2039 - DNA, 20 bp, Homo sapiens
cgaagttgcatgtgtcggtg

SEQ ID NO: 2040 - DNA, 20 bp, Homo sapiens
gtcgaagttgcatgtgtcgg

SEQ ID NO: 2041 - DNA, 20 bp, Homo sapiens
agtcgaagttgcatgtgtcg

SEQ ID NO: 2042 - DNA, 20 bp, Homo sapiens
aagtcgaagttgcatgtgtc

SEQ ID NO: 2043 - DNA, 20 bp, Homo sapiens
caagtcgaagttgcatgtgt

SEQ ID NO: 2044 - DNA, 20 bp, Homo sapiens
ccaagtcgaagttgcatgtg

SEQ ID NO: 2045 - DNA, 20 bp, Homo sapiens
accaagtcgaagttgcatgt

SEQ ID NO: 2046 - DNA, 20 bp, Homo sapiens
caccaagtcgaagttgcatg

SEQ ID NO: 2047 - DNA, 20 bp, Homo sapiens
ccaccaagtcgaagttgcat

SEQ ID NO: 2048 - DNA, 20 bp, Homo sapiens
tccaccaagtcgaagttgca

SEQ ID NO: 2049 - DNA, 20 bp, Homo sapiens
ctccaccaagtcgaagttgc

SEQ ID NO: 2050 - DNA, 20 bp, Homo sapiens
cctccaccaagtcgaagttg

SEQ ID NO: 2051 - DNA, 20 bp, Homo sapiens
tcctccaccaagtcgaagtt

SEQ ID NO: 2052 - DNA, 20 bp, Homo sapiens
gtcctccaccaagtcgaagt

SEQ ID NO: 2053 - DNA, 20 bp, Homo sapiens
cgtcctccaccaagtcgaag

SEQ ID NO: 2054 - DNA, 20 bp, Homo sapiens
ccgtcctccaccaagtcgaa

SEQ ID NO: 2055 - DNA, 20 bp, Homo sapiens
cccgtcctccaccaagtcga

SEQ ID NO: 2056 - DNA, 20 bp, Homo sapiens
gcccgtcctccaccaagtcg

SEQ ID NO: 2057 - DNA, 20 bp, Homo sapiens
agcccgtcctccaccaagtc

SEQ ID NO: 2058 - DNA, 20 bp, Homo sapiens
gagcccgtcctccaccaagt

SEQ ID NO: 2059 - DNA, 20 bp, Homo sapiens
tgagcccgtcctccaccaag

SEQ ID NO: 2060 - DNA, 20 bp, Homo sapiens
ggttccgagcctctgcctcg

SEQ ID NO: 2061 - DNA, 20 bp, Homo sapiens
cggttccgagcctctgcctc

SEQ ID NO: 2062 - DNA, 20 bp, Homo sapiens
ccggttccgagcctctgcct

SEQ ID NO: 2063 - DNA, 20 bp, Homo sapiens
cccggttccgagcctctgcc

SEQ ID NO: 2064 - DNA, 20 bp, Homo sapiens
tcccggttccgagcctctgc

SEQ ID NO: 2065 - DNA, 20 bp, Homo sapiens
gtcccggttccgagcctctg

SEQ ID NO: 2066 - DNA, 20 bp, Homo sapiens
aggtcccggttccgagcctc

SEQ ID NO: 2067 - DNA, 20 bp, Homo sapiens
taggtcccggttccgagcct

SEQ ID NO: 2068 - DNA, 20 bp, Homo sapiens
ctaggtcccggttccgagcc

SEQ ID NO: 2069 - DNA, 20 bp, Homo sapiens
tctaggtcccggttccgagc

SEQ ID NO: 2070 - DNA, 20 bp, Homo sapiens
ctctaggtcccggttccgag

SEQ ID NO: 2071 - DNA, 20 bp, Homo sapiens
cctctaggtcccggttccga

SEQ ID NO: 2072 - DNA, 20 bp, Homo sapiens
gcctctaggtcccggttccg

SEQ ID NO: 2073 - DNA, 20 bp, Homo sapiens
catccgctcctgcaactgcc

SEQ ID NO: 2074 - DNA, 20 bp, Homo sapiens
ccatccgctcctgcaactgc

SEQ ID NO: 2075 - DNA, 20 bp, Homo sapiens
tccatccgctcctgcaactg

SEQ ID NO: 2076 - DNA, 20 bp, Homo sapiens
ctccatccgctcctgcaact

SEQ ID NO: 2077 - DNA, 20 bp, Homo sapiens
actccatccgctcctgcaac

SEQ ID NO: 2078 - DNA, 20 bp, Homo sapiens
aactccatccgctcctgcaa

SEQ ID NO: 2079 - DNA, 20 bp, Homo sapiens
caactccatccgctcctgca

SEQ ID NO: 2080 - DNA, 20 bp, Homo sapiens
agcaactccatccgctcctg

SEQ ID NO: 2081 - DNA, 20 bp, Homo sapiens
cagcaactccatccgctcct

SEQ ID NO: 2082 - DNA, 20 bp, Homo sapiens
gcagcaactccatccgctcc

SEQ ID NO: 2083 - DNA, 20 bp, Homo sapiens
cagctgtggctccctctgcc

SEQ ID NO: 2084 - DNA, 20 bp, Homo sapiens
acagctgtggctccctctgc

SEQ ID NO: 2085 - DNA, 20 bp, Homo sapiens
gacagctgtggctccctctg

SEQ ID NO: 2086 - DNA, 20 bp, Homo sapiens
tgacagctgtggctccctct

SEQ ID NO: 2087 - DNA, 20 bp, Homo sapiens
gtgacagctgtggctccctc

SEQ ID NO: 2088 - DNA, 20 bp, Homo sapiens
cgtgacagctgtggctccct

SEQ ID NO: 2089 - DNA, 20 bp, Homo sapiens
ccgtgacagctgtggctccc

SEQ ID NO: 2090 - DNA, 20 bp, Homo sapiens
cccgtgacagctgtggctcc

SEQ ID NO: 2091 - DNA, 20 bp, Homo sapiens
ccccgtgacagctgtggctc

SEQ ID NO: 2092 - DNA, 20 bp, Homo sapiens
cccccgtgacagctgtggct

SEQ ID NO: 2093 - DNA, 20 bp, Homo sapiens
acccccgtgacagctgtggc

SEQ ID NO: 2094 - DNA, 20 bp, Homo sapiens
gacccccgtgacagctgtgg

SEQ ID NO: 2095 - DNA, 20 bp, Homo sapiens
ggacccccgtgacagctgtg

SEQ ID NO: 2096 - DNA, 20 bp, Homo sapiens
gggacccccgtgacagctgt

SEQ ID NO: 2097 - DNA, 20 bp, Homo sapiens
gaaggtggatccgtggcccg

SEQ ID NO: 2098 - DNA, 20 bp, Homo sapiens
ggaaggtggatccgtggccc

SEQ ID NO: 2099 - DNA, 20 bp, Homo sapiens
gggaaggtggatccgtggcc

SEQ ID NO: 2100 - DNA, 20 bp, Homo sapiens
tgggaaggtggatccgtggc

SEQ ID NO: 2101 - DNA, 20 bp, Homo sapiens
atgggaaggtggatccgtgg

SEQ ID NO: 2102 - DNA, 20 bp, Homo sapiens
gatgggaaggtggatccgtg

SEQ ID NO: 2103 - DNA, 20 bp, Homo sapiens
tagatgggaaggtggatccg

SEQ ID NO: 2104 - DNA, 20 bp, Homo sapiens
ctagatgggaaggtggatcc

SEQ ID NO: 2105 - DNA, 20 bp, Homo sapiens
tctagatgggaaggtggatc

SEQ ID NO: 2106 - DNA, 20 bp, Homo sapiens
atctagatgggaaggtggat

SEQ ID NO: 2107 - DNA, 20 bp, Homo sapiens
ccatctagatgggaaggtgg

SEQ ID NO: 2108 - DNA, 20 bp, Homo sapiens
gccatctagatgggaaggtg

SEQ ID NO: 2109 - DNA, 20 bp, Homo sapiens
ggccatctagatgggaaggt

SEQ ID NO: 2110 - DNA, 20 bp, Homo sapiens
caccagcgggcactggccca

SEQ ID NO: 2111 - DNA, 20 bp, Homo sapiens
ccaccagcgggcactggccc

SEQ ID NO: 2112 - DNA, 20 bp, Homo sapiens
cccaccagcgggcactggcc

SEQ ID NO: 2113 - DNA, 20 bp, Homo sapiens
ccccaccagcgggcactggc

SEQ ID NO: 2114 - DNA, 20 bp, Homo sapiens
ggccccaccagcgggcactg

SEQ ID NO: 2115 - DNA, 20 bp, Homo sapiens
tggccccaccagcgggcact

SEQ ID NO: 2116 - DNA, 20 bp, Homo sapiens
ctggccccaccagcgggcac

SEQ ID NO: 2117 - DNA, 20 bp, Homo sapiens
cctggccccaccagcgggca

SEQ ID NO: 2118 - DNA, 20 bp, Homo sapiens
gcctggccccaccagcgggc

SEQ ID NO: 2119 - DNA, 20 bp, Homo sapiens
gggcctggccccaccagcgg

SEQ ID NO: 2120 - DNA, 20 bp, Homo sapiens
aggtggcggcggtgcatggg

SEQ ID NO: 2121 - DNA, 20 bp, Homo sapiens
caggtggcggcggtgcatgg

SEQ ID NO: 2122 - DNA, 20 bp, Homo sapiens
gcaggtggcggcggtgcatg

SEQ ID NO: 2123 - DNA, 20 bp, Homo sapiens
agcaggtggcggcggtgcat

SEQ ID NO: 2124 - DNA, 20 bp, Homo sapiens
cagcaggtggcggcggtgca

SEQ ID NO: 2125 - DNA, 20 bp, Homo sapiens
gcagcaggtggcggcggtgc

SEQ ID NO: 2126 - DNA, 20 bp, Homo sapiens
agcagcaggtggcggcggtg

SEQ ID NO: 2127 - DNA, 20 bp, Homo sapiens
gagcagcaggtggcggcggt

SEQ ID NO: 2128 - DNA, 20 bp, Homo sapiens
ggagcagcaggtggcggcgg

SEQ ID NO: 2129 - DNA, 20 bp, Homo sapiens
gggagcagcaggtggcggcg

SEQ ID NO: 2130 - DNA, 20 bp, Homo sapiens
agggagcagcaggtggcggc

SEQ ID NO: 2131 - DNA, 20 bp, Homo sapiens
cagggagcagcaggtggcgg

SEQ ID NO: 2132 - DNA, 20 bp, Homo sapiens
gcagggagcagcaggtggcg

SEQ ID NO: 2133 - DNA, 20 bp, Homo sapiens
ggcagggagcagcaggtggc

SEQ ID NO: 2134 - DNA, 20 bp, Homo sapiens
tggcagggagcagcaggtgg

SEQ ID NO: 2135 - DNA, 20 bp, Homo sapiens
ctggcagggagcagcaggtg

SEQ ID NO: 2136 - DNA, 20 bp, Homo sapiens
ccctggcagggagcagcagg

SEQ ID NO: 2137 - DNA, 20 bp, Homo sapiens
accctggcagggagcagcag

SEQ ID NO: 2138 - DNA, 20 bp, Homo sapiens
gaccctggcagggagcagca

SEQ ID NO: 2139 - DNA, 20 bp, Homo sapiens
ggaccctggcagggagcagc

SEQ ID NO: 2140 - DNA, 20 bp, Homo sapiens
ggcctagggaccctggcagg

SEQ ID NO: 2141 - DNA, 20 bp, Homo sapiens
aggcctagggaccctggcag

SEQ ID NO: 2142 - DNA, 20 bp, Homo sapiens
ccaggcctagggaccctggc

SEQ ID NO: 2143 - DNA, 20 bp, Homo sapiens
gccaggcctagggaccctgg

SEQ ID NO: 2144 - DNA, 20 bp, Homo sapiens
ggccaggcctagggaccctg

SEQ ID NO: 2145 - DNA, 20 bp, Homo sapiens
aggccaggcctagggaccct

SEQ ID NO: 2146 - DNA, 20 bp, Homo sapiens
taggccaggcctagggaccc

SEQ ID NO: 2147 - DNA, 20 bp, Homo sapiens
ataggccaggcctagggacc

SEQ ID NO: 2148 - DNA, 20 bp, Homo sapiens
gataggccaggcctagggac

SEQ ID NO: 2149 - DNA, 20 bp, Homo sapiens
cgataggccaggcctaggga

SEQ ID NO: 2150 - DNA, 20 bp, Homo sapiens
ccgataggccaggcctaggg

SEQ ID NO: 2151 - DNA, 20 bp, Homo sapiens
tccgataggccaggcctagg

SEQ ID NO: 2152 - DNA, 20 bp, Homo sapiens
ctccgataggccaggcctag

SEQ ID NO: 2153 - DNA, 20 bp, Homo sapiens
cctccgataggccaggccta

SEQ ID NO: 2154 - DNA, 20 bp, Homo sapiens
gcctccgataggccaggcct

SEQ ID NO: 2155 - DNA, 20 bp, Homo sapiens
gcgcctccgataggccaggc

SEQ ID NO: 2156 - DNA, 20 bp, Homo sapiens
aacaggagcagggaaagcgc

SEQ ID NO: 2157 - DNA, 20 bp, Homo sapiens
gaacaggagcagggaaagcg

SEQ ID NO: 2158 - DNA, 20 bp, Homo sapiens
cgaacaggagcagggaaagc

SEQ ID NO: 2159 - DNA, 20 bp, Homo sapiens
gcgaacaggagcagggaaag

SEQ ID NO: 2160 - DNA, 20 bp, Homo sapiens
ggcgaacaggagcagggaaa

SEQ ID NO: 2161 - DNA, 20 bp, Homo sapiens
cggcgaacaggagcagggaa

SEQ ID NO: 2162 - DNA, 20 bp, Homo sapiens
acggcgaacaggagcaggga

SEQ ID NO: 2163 - DNA, 20 bp, Homo sapiens
aacggcgaacaggagcaggg

SEQ ID NO: 2164 - DNA, 20 bp, Homo sapiens
caacggcgaacaggagcagg

SEQ ID NO: 2165 - DNA, 20 bp, Homo sapiens
gggcggcggcacgagacaga

SEQ ID NO: 2166 - DNA, 20 bp, Homo sapiens
agggcggcggcacgagacag

SEQ ID NO: 2167 - DNA, 20 bp, Homo sapiens
cagggcggcggcacgagaca

SEQ ID NO: 2168 - DNA, 20 bp, Homo sapiens
ccagggcggcggcacgagac

SEQ ID NO: 2169 - DNA, 20 bp, Homo sapiens
cccagggcggcggcacgaga

SEQ ID NO: 2170 - DNA, 20 bp, Homo sapiens
gcccagggcggcggcacgag

SEQ ID NO: 2171 - DNA, 20 bp, Homo sapiens
agcccagggcggcggcacga

SEQ ID NO: 2172 - DNA, 20 bp, Homo sapiens
cagcccagggcggcggcacg

SEQ ID NO: 2173 - DNA, 20 bp, Homo sapiens
gcagcccagggcggcggcac

SEQ ID NO: 2174 - DNA, 20 bp, Homo sapiens
ctgcggtgagttggccggcg

SEQ ID NO: 2175 - DNA, 20 bp, Homo sapiens
actgcggtgagttggccggc

SEQ ID NO: 2176 - DNA, 20 bp, Homo sapiens
gactgcggtgagttggccgg

SEQ ID NO: 2177 - DNA, 20 bp, Homo sapiens
agactgcggtgagttggccg

SEQ ID NO: 2178 - DNA, 20 bp, Homo sapiens
cagactgcggtgagttggcc

SEQ ID NO: 2179 - DNA, 20 bp, Homo sapiens
ccagactgcggtgagttggc

SEQ ID NO: 2180 - DNA, 20 bp, Homo sapiens
gccagactgcggtgagttgg

SEQ ID NO: 2181 - DNA, 20 bp, Homo sapiens
cgccagactgcggtgagttg

SEQ ID NO: 2182 - DNA, 20 bp, Homo sapiens
aagacagttctagggttcag

SEQ ID NO: 2183 - DNA, 20 bp, Homo sapiens
gaagacagttctagggttca

SEQ ID NO: 2184 - DNA, 20 bp, Homo sapiens
cgaagacagttctagggttc

SEQ ID NO: 2185 - DNA, 20 bp, Homo sapiens
tcgaagacagttctagggtt

SEQ ID NO: 2186 - DNA, 20 bp, Homo sapiens
gtcgaagacagttctagggt

SEQ ID NO: 2187 - DNA, 20 bp, Homo sapiens
agtcgaagacagttctaggg

SEQ ID NO: 2188 - DNA, 20 bp, Homo sapiens
gagtcgaagacagttctagg

SEQ ID NO: 2189 - DNA, 20 bp, Homo sapiens
ggagtcgaagacagttctag

SEQ ID NO: 2190 - DNA, 20 bp, Homo sapiens
cggagtcgaagacagttcta

SEQ ID NO: 2191 - DNA, 20 bp, Homo sapiens
ccggagtcgaagacagttct

SEQ ID NO: 2192 - DNA, 20 bp, Homo sapiens
cccggagtcgaagacagttc

SEQ ID NO: 2193 - DNA, 20 bp, Homo sapiens
ccccggagtcgaagacagtt

SEQ ID NO: 2194 - DNA, 20 bp, Homo sapiens
gccccggagtcgaagacagt

SEQ ID NO: 2195 - DNA, 20 bp, Homo sapiens
ggccccggagtcgaagacag

SEQ ID NO: 2196 - DNA, 20 bp, Homo sapiens
gggccccggagtcgaagaca

SEQ ID NO: 2197 - DNA, 20 bp, Homo sapiens
aggcggtgggcgcggcttct

SEQ ID NO: 2198 - DNA, 20 bp, Homo sapiens
caggcggtgggcgcggcttc

SEQ ID NO: 2199 - DNA, 20 bp, Homo sapiens
gcaggcggtgggcgcggctt

SEQ ID NO: 2200 - DNA, 20 bp, Homo sapiens
tggcaggcggtgggcgcggc

SEQ ID NO: 2201 - DNA, 20 bp, Homo sapiens
actggcaggcggtgggcgcg

SEQ ID NO: 2202 - DNA, 20 bp, Homo sapiens
gaactggcaggcggtgggcg

SEQ ID NO: 2203 - DNA, 20 bp, Homo sapiens
tgaactggcaggcggtgggc

SEQ ID NO: 2204 - DNA, 20 bp, Homo sapiens
tgtgaactggcaggcggtgg

SEQ ID NO: 2205 - DNA, 20 bp, Homo sapiens
tggagctgggcggagaccca

SEQ ID NO: 2206 - DNA, 20 bp, Homo sapiens
actggagctgggcggagacc

SEQ ID NO: 2207 - DNA, 20 bp, Homo sapiens
gactggagctgggcggagac

SEQ ID NO: 2208 - DNA, 20 bp, Homo sapiens
aggactggagctgggcggag

SEQ ID NO: 2209 - DNA, 20 bp, Homo sapiens
acaggactggagctgggcgg

SEQ ID NO: 2210 - DNA, 20 bp, Homo sapiens
cacaggactggagctgggcg

SEQ ID NO: 2211 - DNA, 20 bp, Homo sapiens
tcacaggactggagctgggc

SEQ ID NO: 2212 - DNA, 20 bp, Homo sapiens
gcctcagcctggccgaaaga

SEQ ID NO: 2213 - DNA, 20 bp, Homo sapiens
ggcctcagcctggccgaaag

SEQ ID NO: 2214 - DNA, 20 bp, Homo sapiens
accccactgcaagaagtcgg

SEQ ID NO: 2215 - DNA, 20 bp, Homo sapiens
gccccaggatgggaggatct

SEQ ID NO: 2216 - DNA, 20 bp, Homo sapiens
cataggacagagaaatgttg

SEQ ID NO: 2217 - DNA, 20 bp, Homo sapiens
tgctgaccttactctgcccc

SEQ ID NO: 2218 - DNA, 20 bp, Homo sapiens
taagccatggctctgagtca

SEQ ID NO: 2219 - DNA, 20 bp, Homo sapiens
agagaggccatgggaggctg

SEQ ID NO: 2220 - DNA, 20 bp, Homo sapiens
ctggccctcctggcttgccc

SEQ ID NO: 2221 - DNA, 20 bp, Homo sapiens
agctgccccatgctggccct

SEQ ID NO: 2222 - DNA, 20 bp, Homo sapiens
gcccctggcagctgccccat

SEQ ID NO: 2223 - DNA, 20 bp, Homo sapiens
ctgtcggctgcgcccctggc

SEQ ID NO: 2224 - DNA, 20 bp, Homo sapiens
cgccgaacacctgcctgtcg

SEQ ID NO: 2225 - DNA, 20 bp, Homo sapiens
cctcccagtgcctgggcacc

SEQ ID NO: 2226 - DNA, 20 bp, Homo sapiens
gcgcctgtctgcaaagctgg

SEQ ID NO: 2227 - DNA, 20 bp, Homo sapiens
cccaaagttgtccctcctgg

SEQ ID NO: 2228 - DNA, 20 bp, Homo sapiens
acacccagaagaacccaaag

SEQ ID NO: 2229 - DNA, 20 bp, Homo sapiens
ctgacccacacggctcatag

SEQ ID NO: 2230 - DNA, 20 bp, Homo sapiens
tggccccaggccctggaaag

SEQ ID NO: 2231 - DNA, 20 bp, Homo sapiens
gacaaggcagctggcagaag

SEQ ID NO: 2232 - DNA, 20 bp, Homo sapiens
aagaaaccagtgaccagtga

SEQ ID NO: 2233 - DNA, 20 bp, Homo sapiens
ctgtgaaatgggaggaggag

SEQ ID NO: 2234 - DNA, 20 bp, Homo sapiens
gaaggtttttccagaggctg

SEQ ID NO: 2235 - DNA, 20 bp, Homo sapiens
ggccaggagagtcattaggg

SEQ ID NO: 2236 - DNA, 20 bp, Homo sapiens
ccacaaaaggagtgctcctc

SEQ ID NO: 2237 - DNA, 20 bp, Homo sapiens
ccttttaaggcagcaggaac

SEQ ID NO: 2238 - DNA, 20 bp, Homo sapiens
ctaggactgtctgcttccca

SEQ ID NO: 2239 - DNA, 20 bp, Homo sapiens
gtcattcatcaatttctaag

SEQ ID NO: 2240 - DNA, 20 bp, Homo sapiens
ggaggagctgcagccggaga

SEQ ID NO: 2241 - DNA, 20 bp, Homo sapiens
gcacccggaggagctgcagc

SEQ ID NO: 2242 - DNA, 20 bp, Homo sapiens
gcacgacacctgcagggcac

SEQ ID NO: 2243 - DNA, 20 bp, Homo sapiens
agctcaccaggtagttctca

SEQ ID NO: 2244 - DNA, 20 bp, Homo sapiens
gcttcctctccccacctcct

SEQ ID NO: 2245 - DNA, 20 bp, Homo sapiens
gcagcacccccaatcctaga

SEQ ID NO: 2246 - DNA, 20 bp, Homo sapiens
gcccctcatccacctgacac

SEQ ID NO: 2247 - DNA, 20 bp, Homo sapiens
ttccaggtaagagacccccc

SEQ ID NO: 2248 - DNA, 20 bp, Homo sapiens
agaataggtcccagacactc

SEQ ID NO: 2249 - DNA, 20 bp, Homo sapiens
ctccccctgagatgttctgg

SEQ ID NO: 2250 - DNA, 20 bp, Homo sapiens
ccccagcccagagataacca

SEQ ID NO: 2251 - DNA, 20 bp, Homo sapiens
cctgatccatcacggatggc

SEQ ID NO: 2252 - DNA, 20 bp, Homo sapiens
tactccatgaccaggtactg

SEQ ID NO: 2253 - DNA, 20 bp, Homo sapiens
gctctgaccttccaagaacc

SEQ ID NO: 2254 - DNA, 20 bp, Homo sapiens
ctcccttctgtggtcccacc

SEQ ID NO: 2255 - DNA, 20 bp, Homo sapiens
gtcgggtttgatgtccctgc

SEQ ID NO: 2256 - DNA, 20 bp, Homo sapiens
agggcactggctcaccgttc

SEQ ID NO: 2257 - DNA, 20 bp, Homo sapiens
gggccctccttccaaccact

SEQ ID NO: 2258 - DNA, 20 bp, Homo sapiens
gcccacccctctgggcccac

SEQ ID NO: 2259 - DNA, 20 bp, Homo sapiens
aggagcagagcgaggcttgg

SEQ ID NO: 2260 - DNA, 20 bp, Homo sapiens
caccttgtagtggacgatct

SEQ ID NO: 2261 - DNA, 20 bp, Homo sapiens
ctaccccgcccccgctcacc

SEQ ID NO: 2262 - DNA, 20 bp, Homo sapiens
ctaggtcactgctgggtcct

SEQ ID NO: 2263 - DNA, 20 bp, Homo sapiens
ctcagatagctccccactcc

SEQ ID NO: 2264 - DNA, 20 bp, Homo sapiens
aattctctaattctctagac

SEQ ID NO: 2265 - DNA, 20 bp, Homo sapiens
tacctgagggccatgcagga

SEQ ID NO: 2266 - DNA, 20 bp, Homo sapiens
gttccaagactgatcctgca

SEQ ID NO: 2267 - DNA, 20 bp, Homo sapiens
aggagggcggtggcgcggcg

SEQ ID NO: 2268 - DNA, 20 bp, Homo sapiens
tgacagctggaaggagaaga

SEQ ID NO: 2269 - DNA, 20 bp, Homo sapiens
catgggaaggtggatccgtg

SEQ ID NO: 2270 - DNA, 20 bp, Homo sapiens
ggaggttatctagggagatc

SEQ ID NO: 2271 - DNA, 20 bp, Homo sapiens
gaagggacaggtgacccgat

SEQ ID NO: 2272 - DNA, 20 bp, Homo sapiens
cgtaccctggcagggagcag

SEQ ID NO: 2273 - DNA, 20 bp, Homo sapiens
ggactcgccccgcctacgcc

SEQ ID NO: 2274 - DNA, 20 bp, Homo sapiens
ctcctgggactcgccccgcc

SEQ ID NO: 2275 - DNA, 20 bp, Homo sapiens
gctcctgggactcgccccgc

SEQ ID NO: 2276 - DNA, 20 bp, Homo sapiens
attggctcctgggactcgcc

SEQ ID NO: 2277 - DNA, 20 bp, Homo sapiens
gattggctcctgggactcgc

SEQ ID NO: 2278 - DNA, 20 bp, Homo sapiens
gcctctgattggctcctggg

SEQ ID NO: 2279 - DNA, 20 bp, Homo sapiens
gcatgggcctctgattggct

SEQ ID NO: 2280 - DNA, 20 bp, Homo sapiens
cacccggcatgggcctctga

SEQ ID NO: 2281 - DNA, 20 bp, Homo sapiens
gccaggcctagggacctgcg

SEQ ID NO: 2282 - DNA, 20 bp, Homo sapiens
tggcccacagccacggccgg

SEQ ID NO: 2283 - DNA, 20 bp, Homo sapiens
ggcctggccccaccagcggg

SEQ ID NO: 2284 - DNA, 20 bp, Homo sapiens
cctggcagggagcagcaggt

SEQ ID NO: 2285 - DNA, 20 bp, Homo sapiens
gtctatggccatgacaatct

SEQ ID NO: 2286 - DNA, 20 bp, Homo sapiens
gggtgcccacagccaccagc

SEQ ID NO: 2287 - DNA, 20 bp, Homo sapiens
ccccgctcaccatggcagtg

SEQ ID NO: 2288 - DNA, 20 bp, Homo sapiens
ataaataccgaggaatgtcg

SEQ ID NO: 2289 - DNA, 20 bp, Homo sapiens
gggacagacaataaataccg

SEQ ID NO: 2290 - DNA, 20 bp, Homo sapiens
ggtgacccgatcggagccca

SEQ ID NO: 2291 - DNA, 20 bp, Homo sapiens
agctggagagagaagggaca

SEQ ID NO: 2292 - DNA, 20 bp, Homo sapiens
gggccatctagctggagaga

SEQ ID NO: 2293 - DNA, 20 bp, Homo sapiens
ccccactgcaagaagtcggc

SEQ ID NO: 2294 - DNA, 20 bp, Homo sapiens
ttgagcccttttaaggcagc

SEQ ID NO: 2295 - DNA, 20 bp, Homo sapiens
acatgggaaggtggatccgt

SEQ ID NO: 2296 - DNA, 20 bp, Homo sapiens
ggaagcacgacacctcgcct

SEQ ID NO: 2297 - DNA, 20 bp, Homo sapiens
ggccatatgggaaggtggat

SEQ ID NO: 2298 - DNA, 25 bp, Homo sapiens
agcagcagcagcagcagcagcagca

SEQ ID NO: 2299 - DNA, 20 bp, Homo sapiens
agcagcagcagcagcagcag

SEQ ID NO: 2300 - DNA, 15 bp, Homo sapiens
gcagcagcagcagca

SEQ ID NO: 2301 - DNA, 19 bp, Homo sapiens
gcagcagcagcagcagcag

SEQ ID NO: 2302 - DNA, 18 bp, Homo sapiens
gcagcagcagcagcagca

SEQ ID NO: 2303 - DNA, 19 bp, Homo sapiens
agcagcagcagcagcagca

SEQ ID NO: 2304 - DNA, 16 bp, Homo sapiens
agcagcagcagcagca

SEQ ID NO: 2305 - DNA, 16 bp, Homo sapiens
gcttgcacgtgtggct

SEQ ID NO: 2306 - DNA, 14 bp, Homo sapiens
cttgcacgtgtggc

SEQ ID NO: 2307 - DNA, 16 bp, Homo sapiens
ggttgtgaactggcag

SEQ ID NO: 2308 - DNA, 14 bp, Homo sapiens
gttgtgaactggca

SEQ ID NO: 2309 - DNA, 16 bp, Homo sapiens
gagcggttgtgaactg

SEQ ID NO: 2310 - DNA, 14 bp, Homo sapiens
agcggttgtgaact

SEQ ID NO: 2311 - DNA, 16 bp, Homo sapiens
gctgccttcccaggcc

SEQ ID NO: 2312 - DNA, 14 bp, Homo sapiens
ctgccttcccaggc

SEQ ID NO: 2313 - DNA, 16 bp, Homo sapiens
gcactttgcgaaccaa

SEQ ID NO: 2314 - DNA, 14 bp, Homo sapiens
cactttgcgaacca

SEQ ID NO: 2315 - DNA, 16 bp, Homo sapiens
gaaagctttgcacttt

SEQ ID NO: 2316 - DNA, 14 bp, Homo sapiens
aaagctttgcactt

SEQ ID NO: 2317 - DNA, 16 bp, Homo sapiens
cggaggacgaggtcaa

SEQ ID NO: 2318 - DNA, 14 bp, Homo sapiens
ggaggacgaggtca

SEQ ID NO: 2319 - DNA, 16 bp, Homo sapiens
agcctgtcagcgagtc

SEQ ID NO: 2320 - DNA, 14 bp, Homo sapiens
gcctgtcagcgagt

SEQ ID NO: 2321 - DNA, 16 bp, Homo sapiens
tcctgtagcctgtcag

SEQ ID NO: 2322 - DNA, 14 bp, Homo sapiens
cctgtagcctgtca

SEQ ID NO: 2323 - DNA, 21 bp, Homo sapiens
gcgtagttgactggcgaagtt

SEQ ID NO: 2324 - DNA, 20 bp, Homo sapiens
ctttgcactttgcgaaccaa

SEQ ID NO: 2325 - DNA, 20 bp, Homo sapiens
ttgcactttgcgaaccaacg

SEQ ID NO: 2326 - DNA, 20 bp, Homo sapiens
aagaaagctttgcactttgc

SEQ ID NO: 2327 - DNA, 20 bp, Homo sapiens
gtcggaggacgaggtcaata

SEQ ID NO: 2328 - DNA, 20 bp, Homo sapiens
cggagcggttgtgaactggc

SEQ ID NO: 2329 - DNA, 16 bp, Homo sapiens
cctcggtatttattgt

SEQ ID NO: 2330 - DNA, 20 bp, Homo sapiens
ggacattcgggaaggtgcgc

SEQ ID NO: 2331 - DNA, 16 bp, Homo sapiens
ctgtcggacattcggg

SEQ ID NO: 2332 - DNA, 17 bp, Homo sapiens
agttcacaaccgctccg

SEQ ID NO: 2333 - DNA, 17 bp, Homo sapiens
tcctcggtatttattgt

SEQ ID NO: 2334 - DNA, 16 bp, Homo sapiens
cctggcggagattgtc

SEQ ID NO: 2335 - DNA, 16 bp, Homo sapiens
tgtcggacattcggga

SEQ ID NO: 2336 - DNA, 16 bp, Homo sapiens
actggacaacattaca

SEQ ID NO: 2337 - DNA, 16 bp, Homo sapiens
ctggacaacattacac

SEQ ID NO: 2338 - DNA, 20 bp, Homo sapiens
tgaagaggggcgaggtgtcg

SEQ ID NO: 2339 - DNA, 20 bp, Homo sapiens
gaagaggggcgaggtgtcgt

SEQ ID NO: 2340 - DNA, 20 bp, Homo sapiens
aagaggggcgaggtgtcgtg

SEQ ID NO: 2341 - DNA, 20 bp, Homo sapiens
agaggggcgaggtgtcgtgc

SEQ ID NO: 2342 - DNA, 20 bp, Homo sapiens
gaggggcgaggtgtcgtgct

SEQ ID NO: 2343 - DNA, 20 bp, Homo sapiens
aggggcgaggtgtcgtgctt

SEQ ID NO: 2344 - DNA, 20 bp, Homo sapiens
ggggcgaggtgtcgtgcttc

SEQ ID NO: 2345 - DNA, 20 bp, Homo sapiens
gggcgaggtgtcgtgcttcc

SEQ ID NO: 2346 - DNA, 20 bp, Homo sapiens
ggcgaggtgtcgtgcttccg

SEQ ID NO: 2347 - DNA, 20 bp, Homo sapiens
gcgaggtgtcgtgcttccgt

SEQ ID NO: 2348 - DNA, 20 bp, Homo sapiens
cgaggtgtcgtgcttccgtg

SEQ ID NO: 2349 - DNA, 20 bp, Homo sapiens
gaggtgtcgtgcttccgtga

SEQ ID NO: 2350 - DNA, 20 bp, Homo sapiens
aggtgtcgtgcttccgtgag

SEQ ID NO: 2351 - DNA, 20 bp, Homo sapiens
ggtgtcgtgcttccgtgagg

SEQ ID NO: 2352 - DNA, 20 bp, Homo sapiens
gtgtcgtgcttccgtgagga

SEQ ID NO: 2353 - DNA, 20 bp, Homo sapiens
tgtcgtgcttccgtgaggag

SEQ ID NO: 2354 - DNA, 20 bp, Homo sapiens
gtcgtgcttccgtgaggaga

SEQ ID NO: 2355 - DNA, 20 bp, Homo sapiens
tcgtgcttccgtgaggagag

SEQ ID NO: 2356 - DNA, 20 bp, Homo sapiens
cgtgcttccgtgaggagagg

SEQ ID NO: 2357 - DNA, 20 bp, Homo sapiens
gtgcttccgtgaggagaggg

SEQ ID NO: 2358 - DNA, 20 bp, Homo sapiens
tgcttccgtgaggagaggga

SEQ ID NO: 2359 - DNA, 20 bp, Homo sapiens
gcttccgtgaggagagggac

SEQ ID NO: 2360 - DNA, 20 bp, Homo sapiens
cttccgtgaggagagggacg

SEQ ID NO: 2361 - DNA, 20 bp, Homo sapiens
cgtgttggtgaatggggacc

SEQ ID NO: 2362 - DNA, 20 bp, Homo sapiens
gtgttggtgaatggggaccg

SEQ ID NO: 2363 - DNA, 20 bp, Homo sapiens
tgttggtgaatggggaccgg

SEQ ID NO: 2364 - DNA, 20 bp, Homo sapiens
gttggtgaatggggaccggc

SEQ ID NO: 2365 - DNA, 20 bp, Homo sapiens
ttggtgaatggggaccggcg

SEQ ID NO: 2366 - DNA, 20 bp, Homo sapiens
tggtgaatggggaccggcgg

SEQ ID NO: 2367 - DNA, 20 bp, Homo sapiens
ggtgaatggggaccggcggt

SEQ ID NO: 2368 - DNA, 20 bp, Homo sapiens
gtgaatggggaccggcggtg

SEQ ID NO: 2369 - DNA, 20 bp, Homo sapiens
tgaatggggaccggcggtgg

SEQ ID NO: 2370 - DNA, 20 bp, Homo sapiens
gaatggggaccggcggtgga

SEQ ID NO: 2371 - DNA, 20 bp, Homo sapiens
aatggggaccggcggtggat

SEQ ID NO: 2372 - DNA, 20 bp, Homo sapiens
atggggaccggcggtggatc

SEQ ID NO: 2373 - DNA, 20 bp, Homo sapiens
tggggaccggcggtggatca

SEQ ID NO: 2374 - DNA, 20 bp, Homo sapiens
ggggaccggcggtggatcac

SEQ ID NO: 2375 - DNA, 20 bp, Homo sapiens
gggaccggcggtggatcacg

SEQ ID NO: 2376 - DNA, 20 bp, Homo sapiens
ttcgccttccaggatgagaa

SEQ ID NO: 2377 - DNA, 20 bp, Homo sapiens
tcgccttccaggatgagaac

SEQ ID NO: 2378 - DNA, 20 bp, Homo sapiens
cgccttccaggatgagaact

SEQ ID NO: 2379 - DNA, 20 bp, Homo sapiens
ccttccaggatgagaactac

SEQ ID NO: 2380 - DNA, 20 bp, Homo sapiens
cttccaggatgagaactacc

SEQ ID NO: 2381 - DNA, 20 bp, Homo sapiens
ttccaggatgagaactacct

SEQ ID NO: 2382 - DNA, 20 bp, Homo sapiens
tccaggatgagaactacctg

SEQ ID NO: 2383 - DNA, 20 bp, Homo sapiens
caggatgagaactacctgta

SEQ ID NO: 2384 - DNA, 20 bp, Homo sapiens
aggatgagaactacctgtac

SEQ ID NO: 2385 - DNA, 20 bp, Homo sapiens
ggatgagaactacctgtacc

SEQ ID NO: 2386 - DNA, 20 bp, Homo sapiens
gatgagaactacctgtacct

SEQ ID NO: 2387 - DNA, 20 bp, Homo sapiens
tgagaactacctgtacctgg

SEQ ID NO: 2388 - DNA, 20 bp, Homo sapiens
gagaactacctgtacctggt

SEQ ID NO: 2389 - DNA, 20 bp, Homo sapiens
agaactacctgtacctggtc

SEQ ID NO: 2390 - DNA, 20 bp, Homo sapiens
gaactacctgtacctggtca

SEQ ID NO: 2391 - DNA, 20 bp, Homo sapiens
actacctgtacctggtcatg

SEQ ID NO: 2392 - DNA, 20 bp, Homo sapiens
ctacctgtacctggtcatgg

SEQ ID NO: 2393 - DNA, 20 bp, Homo sapiens
tacctgtacctggtcatgga

SEQ ID NO: 2394 - DNA, 20 bp, Homo sapiens
acctgtacctggtcatggag

SEQ ID NO: 2395 - DNA, 20 bp, Homo sapiens
cctgtacctggtcatggagt

SEQ ID NO: 2396 - DNA, 20 bp, Homo sapiens
ctgtacctggtcatggagta

SEQ ID NO: 2397 - DNA, 20 bp, Homo sapiens
tgtacctggtcatggagtat

SEQ ID NO: 2398 - DNA, 20 bp, Homo sapiens
gtacctggtcatggagtatt

SEQ ID NO: 2399 - DNA, 20 bp, Homo sapiens
tacctggtcatggagtatta

SEQ ID NO: 2400 - DNA, 20 bp, Homo sapiens
cctggtcatggagtattacg

SEQ ID NO: 2401 - DNA, 20 bp, Homo sapiens
ggggacctgctgacactgct

SEQ ID NO: 2402 - DNA, 20 bp, Homo sapiens
gggacctgctgacactgctg

SEQ ID NO: 2403 - DNA, 20 bp, Homo sapiens
ggacctgctgacactgctga

SEQ ID NO: 2404 - DNA, 20 bp, Homo sapiens
gacctgctgacactgctgag

SEQ ID NO: 2405 - DNA, 20 bp, Homo sapiens
acctgctgacactgctgagc

SEQ ID NO: 2406 - DNA, 20 bp, Homo sapiens
cctgctgacactgctgagca

SEQ ID NO: 2407 - DNA, 20 bp, Homo sapiens
ctgctgacactgctgagcaa

SEQ ID NO: 2408 - DNA, 20 bp, Homo sapiens
tgctgacactgctgagcaag

SEQ ID NO: 2409 - DNA, 20 bp, Homo sapiens
gctgacactgctgagcaagt

SEQ ID NO: 2410 - DNA, 20 bp, Homo sapiens
ctgacactgctgagcaagtt

SEQ ID NO: 2411 - DNA, 20 bp, Homo sapiens
tgacactgctgagcaagttt

SEQ ID NO: 2412 - DNA, 20 bp, Homo sapiens
gacactgctgagcaagtttg

SEQ ID NO: 2413 - DNA, 20 bp, Homo sapiens
acactgctgagcaagtttgg

SEQ ID NO: 2414 - DNA, 20 bp, Homo sapiens
cactgctgagcaagtttggg

SEQ ID NO: 2415 - DNA, 20 bp, Homo sapiens
ttggtggaggacgggctcac

SEQ ID NO: 2416 - DNA, 20 bp, Homo sapiens
tggtggaggacgggctcact

SEQ ID NO: 2417 - DNA, 20 bp, Homo sapiens
ggtggaggacgggctcactg

SEQ ID NO: 2418 - DNA, 20 bp, Homo sapiens
gtggaggacgggctcactgc

SEQ ID NO: 2419 - DNA, 20 bp, Homo sapiens
tggaggacgggctcactgcc

SEQ ID NO: 2420 - DNA, 20 bp, Homo sapiens
ggaggacgggctcactgcca

SEQ ID NO: 2421 - DNA, 20 bp, Homo sapiens
aggacgggctcactgccatg

SEQ ID NO: 2422 - DNA, 20 bp, Homo sapiens
ggacgggctcactgccatgg

SEQ ID NO: 2423 - DNA, 20 bp, Homo sapiens
gacgggctcactgccatgga

SEQ ID NO: 2424 - DNA, 20 bp, Homo sapiens
acgggctcactgccatggag

SEQ ID NO: 2425 - DNA, 20 bp, Homo sapiens
cgggctcactgccatggaga

SEQ ID NO: 2426 - DNA, 20 bp, Homo sapiens
gggctcactgccatggagac

SEQ ID NO: 2427 - DNA, 20 bp, Homo sapiens
ctgtcggacattcgggaagg

SEQ ID NO: 2428 - DNA, 20 bp, Homo sapiens
tgtcggacattcgggaaggt

SEQ ID NO: 2429 - DNA, 20 bp, Homo sapiens
gtcggacattcgggaaggtg

SEQ ID NO: 2430 - DNA, 20 bp, Homo sapiens
tcggacattcgggaaggtgc

SEQ ID NO: 2431 - DNA, 20 bp, Homo sapiens
cggacattcgggaaggtgcg

SEQ ID NO: 2432 - DNA, 20 bp, Homo sapiens
gacattcgggaaggtgcgcc

SEQ ID NO: 2433 - DNA, 20 bp, Homo sapiens
ggggtccacctgccttttgt

SEQ ID NO: 2434 - DNA, 20 bp, Homo sapiens
gggtccacctgccttttgtg

SEQ ID NO: 2435 - DNA, 20 bp, Homo sapiens
ggtccacctgccttttgtgg

SEQ ID NO: 2436 - DNA, 20 bp, Homo sapiens
gtccacctgccttttgtggg

SEQ ID NO: 2437 - DNA, 20 bp, Homo sapiens
tccacctgccttttgtgggc

SEQ ID NO: 2438 - DNA, 20 bp, Homo sapiens
ccacctgccttttgtgggct

SEQ ID NO: 2439 - DNA, 20 bp, Homo sapiens
cacctgccttttgtgggcta

SEQ ID NO: 2440 - DNA, 20 bp, Homo sapiens
acctgccttttgtgggctac

SEQ ID NO: 2441 - DNA, 20 bp, Homo sapiens
cctgccttttgtgggctact

SEQ ID NO: 2442 - DNA, 20 bp, Homo sapiens
ctgccttttgtgggctactc

SEQ ID NO: 2443 - DNA, 20 bp, Homo sapiens
tgccttttgtgggctactcc

SEQ ID NO: 2444 - DNA, 20 bp, Homo sapiens
gccttttgtgggctactcct

SEQ ID NO: 2445 - DNA, 20 bp, Homo sapiens
ccttttgtgggctactccta

SEQ ID NO: 2446 - DNA, 20 bp, Homo sapiens
cttttgtgggctactcctac

SEQ ID NO: 2447 - DNA, 20 bp, Homo sapiens
ttttgtgggctactcctact

SEQ ID NO: 2448 - DNA, 20 bp, Homo sapiens
tttgtgggctactcctactc

SEQ ID NO: 2449 - DNA, 20 bp, Homo sapiens
ttgtgggctactcctactcc

SEQ ID NO: 2450 - DNA, 20 bp, Homo sapiens
tgtgggctactcctactcct

SEQ ID NO: 2451 - DNA, 20 bp, Homo sapiens
gtgggctactcctactcctg

SEQ ID NO: 2452 - DNA, 20 bp, Homo sapiens
tgggctactcctactcctgc

SEQ ID NO: 2453 - DNA, 20 bp, Homo sapiens
gggctactcctactcctgca

SEQ ID NO: 2454 - DNA, 20 bp, Homo sapiens
ggctactcctactcctgcat

SEQ ID NO: 2455 - DNA, 20 bp, Homo sapiens
gctactcctactcctgcatg

SEQ ID NO: 2456 - DNA, 20 bp, Homo sapiens
ctactcctactcctgcatgg

SEQ ID NO: 2457 - DNA, 20 bp, Homo sapiens
tactcctactcctgcatggc

SEQ ID NO: 2458 - DNA, 20 bp, Homo sapiens
actcctactcctgcatggcc

SEQ ID NO: 2459 - DNA, 20 bp, Homo sapiens
ctcctactcctgcatggccc

SEQ ID NO: 2460 - DNA, 20 bp, Homo sapiens
tcctactcctgcatggccct

SEQ ID NO: 2461 - DNA, 20 bp, Homo sapiens
cctactcctgcatggccctc

SEQ ID NO: 2462 - DNA, 20 bp, Homo sapiens
tactcctgcatggccctcag

SEQ ID NO: 2463 - DNA, 20 bp, Homo sapiens
actcctgcatggccctcagg

SEQ ID NO: 2464 - DNA, 20 bp, Homo sapiens
ctcctgcatggccctcaggg

SEQ ID NO: 2465 - DNA, 20 bp, Homo sapiens
tcctgcatggccctcaggga

SEQ ID NO: 2466 - DNA, 20 bp, Homo sapiens
cctgcatggccctcagggac

SEQ ID NO: 2467 - DNA, 20 bp, Homo sapiens
ctgcatggccctcagggaca

SEQ ID NO: 2468 - DNA, 20 bp, Homo sapiens
tgcatggccctcagggacag

SEQ ID NO: 2469 - DNA, 20 bp, Homo sapiens
gcatggccctcagggacagt

SEQ ID NO: 2470 - DNA, 20 bp, Homo sapiens
catggccctcagggacagtg

SEQ ID NO: 2471 - DNA, 20 bp, Homo sapiens
atggccctcagggacagtga

SEQ ID NO: 2472 - DNA, 20 bp, Homo sapiens
tggccctcagggacagtgag

SEQ ID NO: 2473 - DNA, 20 bp, Homo sapiens
ggccctcagggacagtgagg

SEQ ID NO: 2474 - DNA, 20 bp, Homo sapiens
gccctcagggacagtgaggt

SEQ ID NO: 2475 - DNA, 20 bp, Homo sapiens
ccctcagggacagtgaggtc

SEQ ID NO: 2476 - DNA, 20 bp, Homo sapiens
cctcagggacagtgaggtcc

SEQ ID NO: 2477 - DNA, 20 bp, Homo sapiens
ctcagggacagtgaggtccc

SEQ ID NO: 2478 - DNA, 20 bp, Homo sapiens
cacacccatggaactggagg

SEQ ID NO: 2479 - DNA, 20 bp, Homo sapiens
acacccatggaactggaggc

SEQ ID NO: 2480 - DNA, 20 bp, Homo sapiens
cacccatggaactggaggcc

SEQ ID NO: 2481 - DNA, 20 bp, Homo sapiens
acccatggaactggaggccg

SEQ ID NO: 2482 - DNA, 20 bp, Homo sapiens
cccatggaactggaggccga

SEQ ID NO: 2483 - DNA, 20 bp, Homo sapiens
ccatggaactggaggccgag

SEQ ID NO: 2484 - DNA, 20 bp, Homo sapiens
catggaactggaggccgagc

SEQ ID NO: 2485 - DNA, 20 bp, Homo sapiens
atggaactggaggccgagca

SEQ ID NO: 2486 - DNA, 20 bp, Homo sapiens
tggaactggaggccgagcag

SEQ ID NO: 2487 - DNA, 20 bp, Homo sapiens
ggaactggaggccgagcagc

SEQ ID NO: 2488 - DNA, 20 bp, Homo sapiens
gaactggaggccgagcagct

SEQ ID NO: 2489 - DNA, 20 bp, Homo sapiens
aactggaggccgagcagctg

SEQ ID NO: 2490 - DNA, 20 bp, Homo sapiens
actggaggccgagcagctgc

SEQ ID NO: 2491 - DNA, 20 bp, Homo sapiens
ctggaggccgagcagctgct

SEQ ID NO: 2492 - DNA, 20 bp, Homo sapiens
tggaggccgagcagctgctt

SEQ ID NO: 2493 - DNA, 20 bp, Homo sapiens
ggaggccgagcagctgcttg

SEQ ID NO: 2494 - DNA, 20 bp, Homo sapiens
gaggccgagcagctgcttga

SEQ ID NO: 2495 - DNA, 20 bp, Homo sapiens
aggccgagcagctgcttgag

SEQ ID NO: 2496 - DNA, 20 bp, Homo sapiens
ggccgagcagctgcttgagc

SEQ ID NO: 2497 - DNA, 20 bp, Homo sapiens
gccgagcagctgcttgagcc

SEQ ID NO: 2498 - DNA, 20 bp, Homo sapiens
ccgagcagctgcttgagcca

SEQ ID NO: 2499 - DNA, 20 bp, Homo sapiens
cgagcagctgcttgagccac

SEQ ID NO: 2500 - DNA, 20 bp, Homo sapiens
gagcagctgcttgagccaca

SEQ ID NO: 2501 - DNA, 20 bp, Homo sapiens
agcagctgcttgagccacac

SEQ ID NO: 2502 - DNA, 20 bp, Homo sapiens
ggatgaaacagctgaagtgg

SEQ ID NO: 2503 - DNA, 20 bp, Homo sapiens
atgaaacagctgaagtggca

SEQ ID NO: 2504 - DNA, 20 bp, Homo sapiens
tgaaacagctgaagtggcag

SEQ ID NO: 2505 - DNA, 20 bp, Homo sapiens
gaaacagctgaagtggcagt

SEQ ID NO: 2506 - DNA, 20 bp, Homo sapiens
aaacagctgaagtggcagtt

SEQ ID NO: 2507 - DNA, 20 bp, Homo sapiens
aacagctgaagtggcagttc

SEQ ID NO: 2508 - DNA, 20 bp, Homo sapiens
acagctgaagtggcagttcc

SEQ ID NO: 2509 - DNA, 20 bp, Homo sapiens
cagctgaagtggcagttcca

SEQ ID NO: 2510 - DNA, 20 bp, Homo sapiens
agctgaagtggcagttccag

SEQ ID NO: 2511 - DNA, 20 bp, Homo sapiens
gctgaagtggcagttccagc

SEQ ID NO: 2512 - DNA, 20 bp, Homo sapiens
ctgaagtggcagttccagcg

SEQ ID NO: 2513 - DNA, 20 bp, Homo sapiens
tgaagtggcagttccagcgg

SEQ ID NO: 2514 - DNA, 20 bp, Homo sapiens
gaagtggcagttccagcggc

SEQ ID NO: 2515 - DNA, 20 bp, Homo sapiens
aagtggcagttccagcggct

SEQ ID NO: 2516 - DNA, 20 bp, Homo sapiens
tccctgcggcagaggctgag

SEQ ID NO: 2517 - DNA, 20 bp, Homo sapiens
ccctgcggcagaggctgagg

SEQ ID NO: 2518 - DNA, 20 bp, Homo sapiens
ctgcggcagaggctgaggcc

SEQ ID NO: 2519 - DNA, 20 bp, Homo sapiens
tgcggcagaggctgaggccg

SEQ ID NO: 2520 - DNA, 20 bp, Homo sapiens
gcggcagaggctgaggccga

SEQ ID NO: 2521 - DNA, 20 bp, Homo sapiens
cggcagaggctgaggccgag

SEQ ID NO: 2522 - DNA, 20 bp, Homo sapiens
ggcagaggctgaggccgagg

SEQ ID NO: 2523 - DNA, 20 bp, Homo sapiens
gcagaggctgaggccgaggt

SEQ ID NO: 2524 - DNA, 20 bp, Homo sapiens
cagaggctgaggccgaggtg

SEQ ID NO: 2525 - DNA, 20 bp, Homo sapiens
agaggctgaggccgaggtga

SEQ ID NO: 2526 - DNA, 20 bp, Homo sapiens
gaggctgaggccgaggtgac

SEQ ID NO: 2527 - DNA, 20 bp, Homo sapiens
aggctgaggccgaggtgacg

SEQ ID NO: 2528 - DNA, 20 bp, Homo sapiens
gccctggaggaggaggtgct

SEQ ID NO: 2529 - DNA, 20 bp, Homo sapiens
ccctggaggaggaggtgctc

SEQ ID NO: 2530 - DNA, 20 bp, Homo sapiens
cctggaggaggaggtgctca

SEQ ID NO: 2531 - DNA, 20 bp, Homo sapiens
ctggaggaggaggtgctcac

SEQ ID NO: 2532 - DNA, 20 bp, Homo sapiens
tggaggaggaggtgctcacc

SEQ ID NO: 2533 - DNA, 20 bp, Homo sapiens
ggaggaggaggtgctcaccc

SEQ ID NO: 2534 - DNA, 20 bp, Homo sapiens
gaggaggaggtgctcacccg

SEQ ID NO: 2535 - DNA, 20 bp, Homo sapiens
aggaggaggtgctcacccgg

SEQ ID NO: 2536 - DNA, 20 bp, Homo sapiens
ggaggaggtgctcacccggc

SEQ ID NO: 2537 - DNA, 20 bp, Homo sapiens
gaggaggtgctcacccggca

SEQ ID NO: 2538 - DNA, 20 bp, Homo sapiens
aggaggtgctcacccggcag

SEQ ID NO: 2539 - DNA, 20 bp, Homo sapiens
ggaggtgctcacccggcaga

SEQ ID NO: 2540 - DNA, 20 bp, Homo sapiens
aggtgctcacccggcagagc

SEQ ID NO: 2541 - DNA, 20 bp, Homo sapiens
ggtgctcacccggcagagcc

SEQ ID NO: 2542 - DNA, 20 bp, Homo sapiens
gtgctcacccggcagagcct

SEQ ID NO: 2543 - DNA, 20 bp, Homo sapiens
tgctcacccggcagagcctg

SEQ ID NO: 2544 - DNA, 20 bp, Homo sapiens
gctcacccggcagagcctga

SEQ ID NO: 2545 - DNA, 20 bp, Homo sapiens
tcacccggcagagcctgagc

SEQ ID NO: 2546 - DNA, 20 bp, Homo sapiens
acccggcagagcctgagccg

SEQ ID NO: 2547 - DNA, 20 bp, Homo sapiens
cccggcagagcctgagccgg

SEQ ID NO: 2548 - DNA, 20 bp, Homo sapiens
ccggcagagcctgagccggg

SEQ ID NO: 2549 - DNA, 20 bp, Homo sapiens
cggcagagcctgagccggga

SEQ ID NO: 2550 - DNA, 20 bp, Homo sapiens
ggcagagcctgagccgggag

SEQ ID NO: 2551 - DNA, 20 bp, Homo sapiens
gcagagcctgagccgggaga

SEQ ID NO: 2552 - DNA, 20 bp, Homo sapiens
cagagcctgagccgggagat

SEQ ID NO: 2553 - DNA, 20 bp, Homo sapiens
agagcctgagccgggagatg

SEQ ID NO: 2554 - DNA, 20 bp, Homo sapiens
gagcctgagccgggagatgg

SEQ ID NO: 2555 - DNA, 20 bp, Homo sapiens
agcctgagccgggagatgga

SEQ ID NO: 2556 - DNA, 20 bp, Homo sapiens
gcctgagccgggagatggag

SEQ ID NO: 2557 - DNA, 20 bp, Homo sapiens
cctgagccgggagatggagg

SEQ ID NO: 2558 - DNA, 20 bp, Homo sapiens
ctgagccgggagatggaggc

SEQ ID NO: 2559 - DNA, 20 bp, Homo sapiens
tgagccgggagatggaggcc

SEQ ID NO: 2560 - DNA, 20 bp, Homo sapiens
gagccgggagatggaggcca

SEQ ID NO: 2561 - DNA, 20 bp, Homo sapiens
agccgggagatggaggccat

SEQ ID NO: 2562 - DNA, 20 bp, Homo sapiens
gccgggagatggaggccatc

SEQ ID NO: 2563 - DNA, 20 bp, Homo sapiens
ccgggagatggaggccatcc

SEQ ID NO: 2564 - DNA, 20 bp, Homo sapiens
cgggagatggaggccatccg

SEQ ID NO: 2565 - DNA, 20 bp, Homo sapiens
gggagatggaggccatccgc

SEQ ID NO: 2566 - DNA, 20 bp, Homo sapiens
ggagatggaggccatccgca

SEQ ID NO: 2567 - DNA, 20 bp, Homo sapiens
gcgaggcagaggctcggaac

SEQ ID NO: 2568 - DNA, 20 bp, Homo sapiens
ttcggccaggctgaggccct

SEQ ID NO: 2569 - DNA, 20 bp, Homo sapiens
tcggccaggctgaggccctg

SEQ ID NO: 2570 - DNA, 20 bp, Homo sapiens
ggccaggctgaggccctgac

SEQ ID NO: 2571 - DNA, 20 bp, Homo sapiens
gccaggctgaggccctgacg

SEQ ID NO: 2572 - DNA, 20 bp, Homo sapiens
gcttactcgggaaatttgct

SEQ ID NO: 2573 - DNA, 20 bp, Homo sapiens
cttactcgggaaatttgctt

SEQ ID NO: 2574 - DNA, 20 bp, Homo sapiens
tactcgggaaatttgctttt

SEQ ID NO: 2575 - DNA, 20 bp, Homo sapiens
actcgggaaatttgcttttg

SEQ ID NO: 2576 - DNA, 20 bp, Homo sapiens
ctcgggaaatttgcttttgc

SEQ ID NO: 2577 - DNA, 20 bp, Homo sapiens
tcgggaaatttgcttttgcc

SEQ ID NO: 2578 - DNA, 20 bp, Homo sapiens
cgggaaatttgcttttgcca

SEQ ID NO: 2579 - DNA, 20 bp, Homo sapiens
ggaaatttgcttttgccaaa

SEQ ID NO: 2580 - DNA, 20 bp, Homo sapiens
gaaatttgcttttgccaaac

SEQ ID NO: 2581 - DNA, 20 bp, Homo sapiens
aatttgcttttgccaaaccc

SEQ ID NO: 2582 - DNA, 20 bp, Homo sapiens
atttgcttttgccaaacccg

SEQ ID NO: 2583 - DNA, 20 bp, Homo sapiens
tgcttttgccaaacccgctt

SEQ ID NO: 2584 - DNA, 20 bp, Homo sapiens
gcttcggcggtttggatatt

SEQ ID NO: 2585 - DNA, 20 bp, Homo sapiens
cttcggcggtttggatattt

SEQ ID NO: 2586 - DNA, 20 bp, Homo sapiens
tcggcggtttggatatttat

SEQ ID NO: 2587 - DNA, 20 bp, Homo sapiens
cggcggtttggatatttatt

SEQ ID NO: 2588 - DNA, 20 bp, Homo sapiens
gcggtttggatatttattga

SEQ ID NO: 2589 - DNA, 20 bp, Homo sapiens
cggtttggatatttattgac

SEQ ID NO: 2590 - DNA, 20 bp, Homo sapiens
ggtttggatatttattgacc

SEQ ID NO: 2591 - DNA, 20 bp, Homo sapiens
gtttggatatttattgacct

SEQ ID NO: 2592 - DNA, 20 bp, Homo sapiens
tttggatatttattgacctc

SEQ ID NO: 2593 - DNA, 20 bp, Homo sapiens
tggatatttattgacctcgt

SEQ ID NO: 2594 - DNA, 20 bp, Homo sapiens
ggatatttattgacctcgtc

SEQ ID NO: 2595 - DNA, 20 bp, Homo sapiens
atatttattgacctcgtcct

SEQ ID NO: 2596 - DNA, 20 bp, Homo sapiens
tatttattgacctcgtcctc

SEQ ID NO: 2597 - DNA, 20 bp, Homo sapiens
tttattgacctcgtcctccg

SEQ ID NO: 2598 - DNA, 20 bp, Homo sapiens
ttattgacctcgtcctccga

SEQ ID NO: 2599 - DNA, 20 bp, Homo sapiens
attgacctcgtcctccgact

SEQ ID NO: 2600 - DNA, 20 bp, Homo sapiens
ttgacctcgtcctccgactc

SEQ ID NO: 2601 - DNA, 20 bp, Homo sapiens
gacctcgtcctccgactcgc

SEQ ID NO: 2602 - DNA, 20 bp, Homo sapiens
acctcgtcctccgactcgct

SEQ ID NO: 2603 - DNA, 20 bp, Homo sapiens
cctcgtcctccgactcgctg

SEQ ID NO: 2604 - DNA, 20 bp, Homo sapiens
ctcgtcctccgactcgctga

SEQ ID NO: 2605 - DNA, 20 bp, Homo sapiens
tcgtcctccgactcgctgac

SEQ ID NO: 2606 - DNA, 20 bp, Homo sapiens
gtcctccgactcgctgacag

SEQ ID NO: 2607 - DNA, 20 bp, Homo sapiens
tcctccgactcgctgacagg

SEQ ID NO: 2608 - DNA, 20 bp, Homo sapiens
ctccgactcgctgacaggct

SEQ ID NO: 2609 - DNA, 20 bp, Homo sapiens
cgttttggatgcactgagac

SEQ ID NO: 2610 - DNA, 20 bp, Homo sapiens
gttttggatgcactgagacc

SEQ ID NO: 2611 - DNA, 20 bp, Homo sapiens
ttttggatgcactgagaccc

SEQ ID NO: 2612 - DNA, 20 bp, Homo sapiens
tcgcgaataaaaggccctcc

SEQ ID NO: 2613 - DNA, 20 bp, Homo sapiens
cgcgaataaaaggccctcca

SEQ ID NO: 2614 - DNA, 20 bp, Homo sapiens
gcgaataaaaggccctccat

SEQ ID NO: 2615 - DNA, 20 bp, Homo sapiens
cgaataaaaggccctccatc

SEQ ID NO: 2616 - DNA, 20 bp, Homo sapiens
gaataaaaggccctccatct

SEQ ID NO: 2617 - DNA, 20 bp, Homo sapiens
aataaaaggccctccatctg

SEQ ID NO: 2618 - DNA, 20 bp, Homo sapiens
ataaaaggccctccatctgc

SEQ ID NO: 2619 - DNA, 16 bp, Homo sapiens
tgcttccgtgaggaga

SEQ ID NO: 2620 - DNA, 16 bp, Homo sapiens
gcttccgtgaggagag

SEQ ID NO: 2621 - DNA, 16 bp, Homo sapiens
cttccgtgaggagagg

SEQ ID NO: 2622 - DNA, 16 bp, Homo sapiens
actgctgagcaagttt

SEQ ID NO: 2623 - DNA, 16 bp, Homo sapiens
ctgctgagcaagtttg

SEQ ID NO: 2624 - DNA, 16 bp, Homo sapiens
tgctgagcaagtttgg

SEQ ID NO: 2625 - DNA, 16 bp, Homo sapiens
gctgagcaagtttggg

SEQ ID NO: 2626 - DNA, 16 bp, Homo sapiens
ctgagcaagtttgggg

SEQ ID NO: 2627 - DNA, 16 bp, Homo sapiens
tgagcaagtttgggga

SEQ ID NO: 2628 - DNA, 16 bp, Homo sapiens
cacagggacatcaaac

SEQ ID NO: 2629 - DNA, 16 bp, Homo sapiens
acagggacatcaaacc

SEQ ID NO: 2630 - DNA, 16 bp, Homo sapiens
cagggacatcaaaccc

SEQ ID NO: 2631 - DNA, 16 bp, Homo sapiens
agatcctgcaggctgt

SEQ ID NO: 2632 - DNA, 16 bp, Homo sapiens
gatcctgcaggctgtg

SEQ ID NO: 2633 - DNA, 16 bp, Homo sapiens
atcctgcaggctgtgg

SEQ ID NO: 2634 - DNA, 16 bp, Homo sapiens
tcctgcaggctgtggg

SEQ ID NO: 2635 - DNA, 16 bp, Homo sapiens
cctgcaggctgtgggc

SEQ ID NO: 2636 - DNA, 16 bp, Homo sapiens
ctgcaggctgtgggcg

SEQ ID NO: 2637 - DNA, 16 bp, Homo sapiens
tgcaggctgtgggcgg

SEQ ID NO: 2638 - DNA, 16 bp, Homo sapiens
gcaggctgtgggcggt

SEQ ID NO: 2639 - DNA, 16 bp, Homo sapiens
caggctgtgggcggtg

SEQ ID NO: 2640 - DNA, 16 bp, Homo sapiens
aggctgtgggcggtgg

SEQ ID NO: 2641 - DNA, 16 bp, Homo sapiens
ggctgtgggcggtggg

SEQ ID NO: 2642 - DNA, 16 bp, Homo sapiens
gctgtgggcggtgggc

SEQ ID NO: 2643 - DNA, 16 bp, Homo sapiens
tgggcggtgggcctgg

SEQ ID NO: 2644 - DNA, 16 bp, Homo sapiens
gggcggtgggcctggg

SEQ ID NO: 2645 - DNA, 16 bp, Homo sapiens
ggcggtgggcctggga

SEQ ID NO: 2646 - DNA, 16 bp, Homo sapiens
gggcctgggacaggca

SEQ ID NO: 2647 - DNA, 16 bp, Homo sapiens
ggcctgggacaggcag

SEQ ID NO: 2648 - DNA, 16 bp, Homo sapiens
gcctgggacaggcagc

SEQ ID NO: 2649 - DNA, 16 bp, Homo sapiens
tttcgaaggtgccacc

SEQ ID NO: 2650 - DNA, 16 bp, Homo sapiens
ttcgaaggtgccaccg

SEQ ID NO: 2651 - DNA, 16 bp, Homo sapiens
tcgaaggtgccaccga

SEQ ID NO: 2652 - DNA, 16 bp, Homo sapiens
ggaggacgggctcact

SEQ ID NO: 2653 - DNA, 16 bp, Homo sapiens
gaggacgggctcactg

SEQ ID NO: 2654 - DNA, 16 bp, Homo sapiens
aggacgggctcactgc

SEQ ID NO: 2655 - DNA, 16 bp, Homo sapiens
gtcggacattcgggaa

SEQ ID NO: 2656 - DNA, 16 bp, Homo sapiens
tcggacattcgggaag

SEQ ID NO: 2657 - DNA, 16 bp, Homo sapiens
cggacattcgggaagg

SEQ ID NO: 2658 - DNA, 16 bp, Homo sapiens
ggacattcgggaaggt

SEQ ID NO: 2659 - DNA, 16 bp, Homo sapiens
gacattcgggaaggtg

SEQ ID NO: 2660 - DNA, 16 bp, Homo sapiens
acattcgggaaggtgc

SEQ ID NO: 2661 - DNA, 16 bp, Homo sapiens
cattcgggaaggtgcg

SEQ ID NO: 2662 - DNA, 16 bp, Homo sapiens
agttgcaggagcggat

SEQ ID NO: 2663 - DNA, 16 bp, Homo sapiens
gttgcaggagcggatg

SEQ ID NO: 2664 - DNA, 16 bp, Homo sapiens
ttgcaggagcggatgg

SEQ ID NO: 2665 - DNA, 16 bp, Homo sapiens
tgcaggcagagggagc

SEQ ID NO: 2666 - DNA, 16 bp, Homo sapiens
ggccacggatccacct

SEQ ID NO: 2667 - DNA, 16 bp, Homo sapiens
acggatccaccttccc

SEQ ID NO: 2668 - DNA, 16 bp, Homo sapiens
ctttccctgctcctgt

SEQ ID NO: 2669 - DNA, 16 bp, Homo sapiens
aactcaccgcagtctg

SEQ ID NO: 2670 - DNA, 16 bp, Homo sapiens
gcgccgcccaggagcc

SEQ ID NO: 2671 - DNA, 16 bp, Homo sapiens
ccgcccaggagccgcc

SEQ ID NO: 2672 - DNA, 16 bp, Homo sapiens
ccaggagccgcccgcg

SEQ ID NO: 2673 - DNA, 16 bp, Homo sapiens
ggagccgcccgcgctc

SEQ ID NO: 2674 - DNA, 16 bp, Homo sapiens
ccgcgctccctgaacc

SEQ ID NO: 2675 - DNA, 16 bp, Homo sapiens
cctgaaccctagaact

SEQ ID NO: 2676 - DNA, 16 bp, Homo sapiens
ctgaaccctagaactg

SEQ ID NO: 2677 - DNA, 16 bp, Homo sapiens
tgaaccctagaactgt

SEQ ID NO: 2678 - DNA, 16 bp, Homo sapiens
gaaccctagaactgtc

SEQ ID NO: 2679 - DNA, 16 bp, Homo sapiens
aaccctagaactgtct

SEQ ID NO: 2680 - DNA, 16 bp, Homo sapiens
accctagaactgtctt

SEQ ID NO: 2681 - DNA, 16 bp, Homo sapiens
ccctagaactgtcttc

SEQ ID NO: 2682 - DNA, 16 bp, Homo sapiens
cctagaactgtcttcg

SEQ ID NO: 2683 - DNA, 16 bp, Homo sapiens
ctagaactgtcttcga

SEQ ID NO: 2684 - DNA, 16 bp, Homo sapiens
tagaactgtcttcgac

SEQ ID NO: 2685 - DNA, 16 bp, Homo sapiens
agaactgtcttcgact

SEQ ID NO: 2686 - DNA, 16 bp, Homo sapiens
gaactgtcttcgactc

SEQ ID NO: 2687 - DNA, 16 bp, Homo sapiens
aactgtcttcgactcc

SEQ ID NO: 2688 - DNA, 16 bp, Homo sapiens
actgtcttcgactccg

SEQ ID NO: 2689 - DNA, 16 bp, Homo sapiens
ctgtcttcgactccgg

SEQ ID NO: 2690 - DNA, 16 bp, Homo sapiens
tgtcttcgactccggg

SEQ ID NO: 2691 - DNA, 16 bp, Homo sapiens
gtcttcgactccgggg

SEQ ID NO: 2692 - DNA, 16 bp, Homo sapiens
tcttcgactccggggc

SEQ ID NO: 2693 - DNA, 16 bp, Homo sapiens
cttcgactccggggcc

SEQ ID NO: 2694 - DNA, 16 bp, Homo sapiens
ttcgactccggggccc

SEQ ID NO: 2695 - DNA, 16 bp, Homo sapiens
tgccagttcacaaccg

SEQ ID NO: 2696 - DNA, 16 bp, Homo sapiens
ccagttcacaaccgct

SEQ ID NO: 2697 - DNA, 16 bp, Homo sapiens
tggttcgcaaagtgca

SEQ ID NO: 2698 - DNA, 16 bp, Homo sapiens
cgttggttcgcaaagt

SEQ ID NO: 2699 - DNA, 16 bp, Homo sapiens
caaagtgcaaagcttt

SEQ ID NO: 2700 - DNA, 16 bp, Homo sapiens
gcctgcttactcggga

SEQ ID NO: 2701 - DNA, 16 bp, Homo sapiens
tcctcacttgcgctgc

SEQ ID NO: 2702 - DNA, 16 bp, Homo sapiens
cctccgactcgctgac

SEQ ID NO: 2703 - DNA, 16 bp, Homo sapiens
ccgactcgctgacagg

SEQ ID NO: 2704 - DNA, 16 bp, Homo sapiens
cgactcgctgacaggc

SEQ ID NO: 2705 - DNA, 16 bp, Homo sapiens
ggatgcactgagaccc

SEQ ID NO: 2706 - DNA, 16 bp, Homo sapiens
gcctctggaaaaacct

SEQ ID NO: 2707 - DNA, 16 bp, Homo sapiens
cctctggaaaaacctt

SEQ ID NO: 2708 - DNA, 16 bp, Homo sapiens
ggacccagcagtgacc

SEQ ID NO: 2709 - DNA, 16 bp, Homo sapiens
agcagacagaaaccac

SEQ ID NO: 2710 - DNA, 16 bp, Homo sapiens
gcagacagaaaccacg

SEQ ID NO: 2711 - DNA, 16 bp, Homo sapiens
caccgcctgccagttc

SEQ ID NO: 2712 - DNA, 16 bp, Homo sapiens
cgcctgccagttcaca

SEQ ID NO: 2713 - DNA, 16 bp, Homo sapiens
tccgcccagctccagt

SEQ ID NO: 2714 - DNA, 16 bp, Homo sapiens
gcccagctccagtcct

SEQ ID NO: 2715 - DNA, 16 bp, Homo sapiens
agctccagtcctgtga

SEQ ID NO: 2716 - DNA, 16 bp, Homo sapiens
gctccagtcctgtgat

SEQ ID NO: 2717 - DNA, 16 bp, Homo sapiens
tccagtcctgtgatcc

SEQ ID NO: 2718 - DNA, 16 bp, Homo sapiens
tctttcggccaggctg

SEQ ID NO: 2719 - DNA, 16 bp, Homo sapiens
tttcggccaggctgag

SEQ ID NO: 2720 - DNA, 16 bp, Homo sapiens
aggctgaggccctgac

SEQ ID NO: 2721 - DNA, 16 bp, Homo sapiens
ggctgaggccctgacg

SEQ ID NO: 2722 - DNA, 16 bp, Homo sapiens
gttcgcaaagtgcaaa

SEQ ID NO: 2723 - DNA, 16 bp, Homo sapiens
gcttactcgggaaatt

SEQ ID NO: 2724 - DNA, 16 bp, Homo sapiens
tactcgggaaatttgc

SEQ ID NO: 2725 - DNA, 16 bp, Homo sapiens
actcgggaaatttgct

SEQ ID NO: 2726 - DNA, 16 bp, Homo sapiens
ctcgggaaatttgctt

SEQ ID NO: 2727 - DNA, 16 bp, Homo sapiens
tcgggaaatttgcttt

SEQ ID NO: 2728 - DNA, 16 bp, Homo sapiens
cgggaaatttgctttt

SEQ ID NO: 2729 - DNA, 16 bp, Homo sapiens
ggaaatttgcttttgc

SEQ ID NO: 2730 - DNA, 16 bp, Homo sapiens
gaaatttgcttttgcc

SEQ ID NO: 2731 - DNA, 16 bp, Homo sapiens
aatttgcttttgccaa

SEQ ID NO: 2732 - DNA, 16 bp, Homo sapiens
tttgcttttgccaaac

SEQ ID NO: 2733 - DNA, 16 bp, Homo sapiens
ttgcttttgccaaacc

SEQ ID NO: 2734 - DNA, 16 bp, Homo sapiens
tgcttttgccaaaccc

SEQ ID NO: 2735 - DNA, 16 bp, Homo sapiens
cttttgccaaacccgc

SEQ ID NO: 2736 - DNA, 16 bp, Homo sapiens
ttttgccaaacccgct

SEQ ID NO: 2737 - DNA, 16 bp, Homo sapiens
tttgccaaacccgctt

SEQ ID NO: 2738 - DNA, 16 bp, Homo sapiens
tgcgctgctctcggag

SEQ ID NO: 2739 - DNA, 16 bp, Homo sapiens
gcgctgctctcggagc

SEQ ID NO: 2740 - DNA, 16 bp, Homo sapiens
cgctgctctcggagcc

SEQ ID NO: 2741 - DNA, 16 bp, Homo sapiens
gcggtttggatattta

SEQ ID NO: 2742 - DNA, 16 bp, Homo sapiens
ttggatatttattgac

SEQ ID NO: 2743 - DNA, 16 bp, Homo sapiens
ggatatttattgacct

SEQ ID NO: 2744 - DNA, 16 bp, Homo sapiens
atatttattgacctcg

SEQ ID NO: 2745 - DNA, 16 bp, Homo sapiens
tatttattgacctcgt

SEQ ID NO: 2746 - DNA, 16 bp, Homo sapiens
atttattgacctcgtc

SEQ ID NO: 2747 - DNA, 16 bp, Homo sapiens
tttattgacctcgtcc

SEQ ID NO: 2748 - DNA, 16 bp, Homo sapiens
ttattgacctcgtcct

SEQ ID NO: 2749 - DNA, 16 bp, Homo sapiens
tattgacctcgtcctc

SEQ ID NO: 2750 - DNA, 16 bp, Homo sapiens
attgacctcgtcctcc

SEQ ID NO: 2751 - DNA, 16 bp, Homo sapiens
tgacctcgtcctccga

SEQ ID NO: 2752 - DNA, 16 bp, Homo sapiens
gacctcgtcctccgac

SEQ ID NO: 2753 - DNA, 16 bp, Homo sapiens
acctcgtcctccgact

SEQ ID NO: 2754 - DNA, 16 bp, Homo sapiens
cctcgtcctccgactc

SEQ ID NO: 2755 - DNA, 16 bp, Homo sapiens
ctcgtcctccgactcg

SEQ ID NO: 2756 - DNA, 16 bp, Homo sapiens
cgtcctccgactcgct

SEQ ID NO: 2757 - DNA, 16 bp, Homo sapiens
gtcctccgactcgctg

SEQ ID NO: 2758 - DNA, 16 bp, Homo sapiens
tcctccgactcgctga

SEQ ID NO: 2759 - DNA, 16 bp, Homo sapiens
ctccgactcgctgaca

SEQ ID NO: 2760 - DNA, 16 bp, Homo sapiens
tccgactcgctgacag

SEQ ID NO: 2761 - DNA, 16 bp, Homo sapiens
cgttttggatgcactg

SEQ ID NO: 2762 - DNA, 16 bp, Homo sapiens
gttttggatgcactga

SEQ ID NO: 2763 - DNA, 16 bp, Homo sapiens
ttttggatgcactgag

SEQ ID NO: 2764 - DNA, 16 bp, Homo sapiens
tttggatgcactgaga

SEQ ID NO: 2765 - DNA, 16 bp, Homo sapiens
ttggatgcactgagac

SEQ ID NO: 2766 - DNA, 16 bp, Homo sapiens
tcctcggtatttattg

SEQ ID NO: 2767 - DNA, 16 bp, Homo sapiens
tcggtatttattgtct

SEQ ID NO: 2768 - DNA, 16 bp, Homo sapiens
cggtatttattgtctg

SEQ ID NO: 2769 - DNA, 16 bp, Homo sapiens
gtgtcgtgcttccgtg

SEQ ID NO: 2770 - DNA, 16 bp, Homo sapiens
tgtcgtgcttccgtga

SEQ ID NO: 2771 - DNA, 16 bp, Homo sapiens
gtcgtgcttccgtgag

SEQ ID NO: 2772 - DNA, 16 bp, Homo sapiens
ccgtgaggagagggac

SEQ ID NO: 2773 - DNA, 16 bp, Homo sapiens
cgtgaggagagggacg

SEQ ID NO: 2774 - DNA, 16 bp, Homo sapiens
cgtgttggtgaatggg

SEQ ID NO: 2775 - DNA, 16 bp, Homo sapiens
gtgttggtgaatgggg

SEQ ID NO: 2776 - DNA, 16 bp, Homo sapiens
tgttggtgaatgggga

SEQ ID NO: 2777 - DNA, 16 bp, Homo sapiens
gttggtgaatggggac

SEQ ID NO: 2778 - DNA, 16 bp, Homo sapiens
ttggtgaatggggacc

SEQ ID NO: 2779 - DNA, 16 bp, Homo sapiens
tggtgaatggggaccg

SEQ ID NO: 2780 - DNA, 16 bp, Homo sapiens
ggtgaatggggaccgg

SEQ ID NO: 2781 - DNA, 16 bp, Homo sapiens
gtgaatggggaccggc

SEQ ID NO: 2782 - DNA, 16 bp, Homo sapiens
tgaatggggaccggcg

SEQ ID NO: 2783 - DNA, 16 bp, Homo sapiens
gaatggggaccggcgg

SEQ ID NO: 2784 - DNA, 16 bp, Homo sapiens
aatggggaccggcggt

SEQ ID NO: 2785 - DNA, 16 bp, Homo sapiens
atggggaccggcggtg

SEQ ID NO: 2786 - DNA, 16 bp, Homo sapiens
tggggaccggcggtgg

SEQ ID NO: 2787 - DNA, 16 bp, Homo sapiens
ggggaccggcggtgga

SEQ ID NO: 2788 - DNA, 16 bp, Homo sapiens
gggaccggcggtggat

SEQ ID NO: 2789 - DNA, 16 bp, Homo sapiens
ggaccggcggtggatc

SEQ ID NO: 2790 - DNA, 16 bp, Homo sapiens
gaccggcggtggatca

SEQ ID NO: 2791 - DNA, 16 bp, Homo sapiens
accggcggtggatcac

SEQ ID NO: 2792 - DNA, 16 bp, Homo sapiens
ccggcggtggatcacg

SEQ ID NO: 2793 - DNA, 16 bp, Homo sapiens
ttcgccttccaggatg

SEQ ID NO: 2794 - DNA, 16 bp, Homo sapiens
tcgccttccaggatga

SEQ ID NO: 2795 - DNA, 16 bp, Homo sapiens
ttccaggatgagaact

SEQ ID NO: 2796 - DNA, 16 bp, Homo sapiens
tccaggatgagaacta

SEQ ID NO: 2797 - DNA, 16 bp, Homo sapiens
ccaggatgagaactac

SEQ ID NO: 2798 - DNA, 16 bp, Homo sapiens
gaactacctgtacctg

SEQ ID NO: 2799 - DNA, 16 bp, Homo sapiens
aactacctgtacctgg

SEQ ID NO: 2800 - DNA, 16 bp, Homo sapiens
ctacctgtacctggtc

SEQ ID NO: 2801 - DNA, 16 bp, Homo sapiens
gtacctggtcatggag

SEQ ID NO: 2802 - DNA, 16 bp, Homo sapiens
tacctggtcatggagt

SEQ ID NO: 2803 - DNA, 16 bp, Homo sapiens
acctggtcatggagta

SEQ ID NO: 2804 - DNA, 16 bp, Homo sapiens
cctggtcatggagtat

SEQ ID NO: 2805 - DNA, 16 bp, Homo sapiens
ctggtcatggagtatt

SEQ ID NO: 2806 - DNA, 16 bp, Homo sapiens
tggtcatggagtatta

SEQ ID NO: 2807 - DNA, 16 bp, Homo sapiens
ggtcatggagtattac

SEQ ID NO: 2808 - DNA, 16 bp, Homo sapiens
gtcatggagtattacg

SEQ ID NO: 2809 - DNA, 16 bp, Homo sapiens
gacactgctgagcaag

SEQ ID NO: 2810 - DNA, 16 bp, Homo sapiens
acactgctgagcaagt

SEQ ID NO: 2811 - DNA, 16 bp, Homo sapiens
cactgctgagcaagtt

SEQ ID NO: 2812 - DNA, 16 bp, Homo sapiens
agcaagtttggggagc

SEQ ID NO: 2813 - DNA, 16 bp, Homo sapiens
gcaagtttggggagcg

SEQ ID NO: 2814 - DNA, 16 bp, Homo sapiens
caagtttggggagcgg

SEQ ID NO: 2815 - DNA, 16 bp, Homo sapiens
aagtttggggagcgga

SEQ ID NO: 2816 - DNA, 16 bp, Homo sapiens
agtttggggagcggat

SEQ ID NO: 2817 - DNA, 16 bp, Homo sapiens
gtttggggagcggatt

SEQ ID NO: 2818 - DNA, 16 bp, Homo sapiens
tttggggagcggattc

SEQ ID NO: 2819 - DNA, 16 bp, Homo sapiens
ttggggagcggattcc

SEQ ID NO: 2820 - DNA, 16 bp, Homo sapiens
tggggagcggattccg

SEQ ID NO: 2821 - DNA, 16 bp, Homo sapiens
ggggagcggattccgg

SEQ ID NO: 2822 - DNA, 16 bp, Homo sapiens
gggagcggattccggc

SEQ ID NO: 2823 - DNA, 16 bp, Homo sapiens
gagatggcgcgcttct

SEQ ID NO: 2824 - DNA, 16 bp, Homo sapiens
agatggcgcgcttcta

SEQ ID NO: 2825 - DNA, 16 bp, Homo sapiens
gatggcgcgcttctac

SEQ ID NO: 2826 - DNA, 16 bp, Homo sapiens
atggcgcgcttctacc

SEQ ID NO: 2827 - DNA, 16 bp, Homo sapiens
tggcgcgcttctacct

SEQ ID NO: 2828 - DNA, 16 bp, Homo sapiens
ggcgcgcttctacctg

SEQ ID NO: 2829 - DNA, 16 bp, Homo sapiens
gcgcgcttctacctgg

SEQ ID NO: 2830 - DNA, 16 bp, Homo sapiens
cgcgcttctacctggc

SEQ ID NO: 2831 - DNA, 16 bp, Homo sapiens
gcgcttctacctggcg

SEQ ID NO: 2832 - DNA, 16 bp, Homo sapiens
cgcttctacctggcgg

SEQ ID NO: 2833 - DNA, 16 bp, Homo sapiens
gcttctacctggcgga

SEQ ID NO: 2834 - DNA, 16 bp, Homo sapiens
ctggcggagattgtca

SEQ ID NO: 2835 - DNA, 16 bp, Homo sapiens
tggcggagattgtcat

SEQ ID NO: 2836 - DNA, 16 bp, Homo sapiens
ggcggagattgtcatg

SEQ ID NO: 2837 - DNA, 16 bp, Homo sapiens
gcggagattgtcatgg

SEQ ID NO: 2838 - DNA, 16 bp, Homo sapiens
cggagattgtcatggc

SEQ ID NO: 2839 - DNA, 16 bp, Homo sapiens
ggagattgtcatggcc

SEQ ID NO: 2840 - DNA, 16 bp, Homo sapiens
ctaagagaacagttgg

SEQ ID NO: 2841 - DNA, 16 bp, Homo sapiens
aagagaacagttggtt

SEQ ID NO: 2842 - DNA, 16 bp, Homo sapiens
cagcttttattactgg

SEQ ID NO: 2843 - DNA, 16 bp, Homo sapiens
gcttttattactggac

SEQ ID NO: 2844 - DNA, 16 bp, Homo sapiens
tttattactggacaac

SEQ ID NO: 2845 - DNA, 16 bp, Homo sapiens
tattactggacaacat

SEQ ID NO: 2846 - DNA, 16 bp, Homo sapiens
ttactggacaacatta

SEQ ID NO: 2847 - DNA, 16 bp, Homo sapiens
gtgggtcaggattgaa

SEQ ID NO: 2848 - DNA, 16 bp, Homo sapiens
gggtcaggattgaacc

SEQ ID NO: 2849 - DNA, 16 bp, Homo sapiens
gtcaggattgaaccca

SEQ ID NO: 2850 - DNA, 16 bp, Homo sapiens
caggattgaacccatc

SEQ ID NO: 2851 - DNA, 16 bp, Homo sapiens
ggattgaacccatcct

SEQ ID NO: 2852 - DNA, 16 bp, Homo sapiens
attgaacccatcctct

SEQ ID NO: 2853 - DNA, 16 bp, Homo sapiens
tgaacccatcctctat

SEQ ID NO: 2854 - DNA, 16 bp, Homo sapiens
tgttcccacaggaggg

SEQ ID NO: 2855 - DNA, 16 bp, Homo sapiens
ttcccacaggagggac

SEQ ID NO: 2856 - DNA, 16 bp, Homo sapiens
cccacaggagggactg

SEQ ID NO: 2857 - DNA, 16 bp, Homo sapiens
cacaggagggactgct

SEQ ID NO: 2858 - DNA, 16 bp, Homo sapiens
cttcccacagctgagt

SEQ ID NO: 2859 - DNA, 16 bp, Homo sapiens
cccacagctgagtggg

SEQ ID NO: 2860 - DNA, 16 bp, Homo sapiens
cacagctgagtggggt

SEQ ID NO: 2861 - DNA, 16 bp, Homo sapiens
cagctgagtggggtgt

SEQ ID NO: 2862 - DNA, 16 bp, Homo sapiens
gctgagtggggtgtgc

SEQ ID NO: 2863 - DNA, 16 bp, Homo sapiens
gagtggggtgtgctga

SEQ ID NO: 2864 - DNA, 16 bp, Homo sapiens
ccagtcttaggaccac

SEQ ID NO: 2865 - DNA, 16 bp, Homo sapiens
gtcttaggaccacatc

SEQ ID NO: 2866 - DNA, 16 bp, Homo sapiens
cttaggaccacatctg

SEQ ID NO: 2867 - DNA, 16 bp, Homo sapiens
accacatctgtggagg

SEQ ID NO: 2868 - DNA, 16 bp, Homo sapiens
cacatctgtggaggtg

SEQ ID NO: 2869 - DNA, 16 bp, Homo sapiens
atctgtggaggtggcc

SEQ ID NO: 2870 - DNA, 16 bp, Homo sapiens
tggccagagccaagca

SEQ ID NO: 2871 - DNA, 16 bp, Homo sapiens
gccagagccaagcagt

SEQ ID NO: 2872 - DNA, 16 bp, Homo sapiens
cagagccaagcagtct

SEQ ID NO: 2873 - DNA, 16 bp, Homo sapiens
gagccaagcagtctcc

SEQ ID NO: 2874 - DNA, 16 bp, Homo sapiens
agaagaggggtctgca

SEQ ID NO: 2875 - DNA, 16 bp, Homo sapiens
catgtcaagggaggag

SEQ ID NO: 2876 - DNA, 16 bp, Homo sapiens
gaacatgggggtctgg

SEQ ID NO: 2877 - DNA, 16 bp, Homo sapiens
acatgggggtctggac

SEQ ID NO: 2878 - DNA, 16 bp, Homo sapiens
atgggggtctggaccc

SEQ ID NO: 2879 - DNA, 16 bp, Homo sapiens
agtccctgcagaaggt

SEQ ID NO: 2880 - DNA, 16 bp, Homo sapiens
ccctgcagaaggttta

SEQ ID NO: 2881 - DNA, 16 bp, Homo sapiens
aggggcagggcttttc

SEQ ID NO: 2882 - DNA, 16 bp, Homo sapiens
ggcagggcttttccta

SEQ ID NO: 2883 - DNA, 16 bp, Homo sapiens
cagggcttttcctaag

SEQ ID NO: 2884 - DNA, 16 bp, Homo sapiens
gggcttttcctaagca

SEQ ID NO: 2885 - DNA, 16 bp, Homo sapiens
gcttttcctaagcaga

SEQ ID NO: 2886 - DNA, 16 bp, Homo sapiens
ttcctaagcagaggag

SEQ ID NO: 2887 - DNA, 16 bp, Homo sapiens
cctaagcagaggaggg

SEQ ID NO: 2888 - DNA, 16 bp, Homo sapiens
cccttcctcaaatcag

SEQ ID NO: 2889 - DNA, 16 bp, Homo sapiens
cttcctcaaatcagga

SEQ ID NO: 2890 - DNA, 16 bp, Homo sapiens
tcctcaaatcaggagg

SEQ ID NO: 2891 - DNA, 16 bp, Homo sapiens
ctcaaatcaggaggtc

SEQ ID NO: 2892 - DNA, 16 bp, Homo sapiens
caaatcaggaggtctt

SEQ ID NO: 2893 - DNA, 16 bp, Homo sapiens
aatcaggaggtcttgg

SEQ ID NO: 2894 - DNA, 16 bp, Homo sapiens
gaggtcttggaagcag

SEQ ID NO: 2895 - DNA, 16 bp, Homo sapiens
ggtcttggaagcagct

SEQ ID NO: 2896 - DNA, 16 bp, Homo sapiens
tcttggaagcagctgc

SEQ ID NO: 2897 - DNA, 16 bp, Homo sapiens
tctggttctccaccag

SEQ ID NO: 2898 - DNA, 16 bp, Homo sapiens
tggttctccaccagag

SEQ ID NO: 2899 - DNA, 16 bp, Homo sapiens
gttctccaccagagaa

SEQ ID NO: 2900 - DNA, 16 bp, Homo sapiens
tctccaccagagaatc

SEQ ID NO: 2901 - DNA, 16 bp, Homo sapiens
ggatgaaacagtaagt

SEQ ID NO: 2902 - DNA, 16 bp, Homo sapiens
gaggggagggggtccg

SEQ ID NO: 2903 - DNA, 16 bp, Homo sapiens
ggggagggggtccgtc

SEQ ID NO: 2904 - DNA, 16 bp, Homo sapiens
ggagggggtccgtcag

SEQ ID NO: 2905 - DNA, 16 bp, Homo sapiens
agggggtccgtcaggg

SEQ ID NO: 2906 - DNA, 16 bp, Homo sapiens
gaaaaggtgagggctt

SEQ ID NO: 2907 - DNA, 16 bp, Homo sapiens
aaaggtgagggcttcc

SEQ ID NO: 2908 - DNA, 16 bp, Homo sapiens
aggtgagggcttcccg

SEQ ID NO: 2909 - DNA, 16 bp, Homo sapiens
gtgagggcttcccggg

SEQ ID NO: 2910 - DNA, 16 bp, Homo sapiens
gagggcttcccgggtg

SEQ ID NO: 2911 - DNA, 16 bp, Homo sapiens
gggcttcccgggtggc

SEQ ID NO: 2912 - DNA, 16 bp, Homo sapiens
gcttcccgggtggcgt

SEQ ID NO: 2913 - DNA, 16 bp, Homo sapiens
gggacttcctgaacag

SEQ ID NO: 2914 - DNA, 16 bp, Homo sapiens
gacttcctgaacagaa

SEQ ID NO: 2915 - DNA, 16 bp, Homo sapiens
cttcctgaacagaagc

SEQ ID NO: 2916 - DNA, 16 bp, Homo sapiens
aggggtgggcccaagc

SEQ ID NO: 2917 - DNA, 16 bp, Homo sapiens
gggtgggcccaagcct

SEQ ID NO: 2918 - DNA, 16 bp, Homo sapiens
gtgggcccaagcctcg

SEQ ID NO: 2919 - DNA, 16 bp, Homo sapiens
gggcccaagcctcgct

SEQ ID NO: 2920 - DNA, 16 bp, Homo sapiens
gcccaagcctcgctct

SEQ ID NO: 2921 - DNA, 16 bp, Homo sapiens
ccaagcctcgctctgc

SEQ ID NO: 2922 - DNA, 16 bp, Homo sapiens
aagcctcgctctgctc

SEQ ID NO: 2923 - DNA, 16 bp, Homo sapiens
ctcgctctgctccttt

SEQ ID NO: 2924 - DNA, 16 bp, Homo sapiens
cgctctgctccttttg

SEQ ID NO: 2925 - DNA, 16 bp, Homo sapiens
tgctccttttggtcca

SEQ ID NO: 2926 - DNA, 16 bp, Homo sapiens
ctccttttggtccagg

SEQ ID NO: 2927 - DNA, 16 bp, Homo sapiens
ccttttggtccaggtg

SEQ ID NO: 2928 - DNA, 16 bp, Homo sapiens
ttttggtccaggtgcg

SEQ ID NO: 2929 - DNA, 16 bp, Homo sapiens
tggtccaggtgcggtc

SEQ ID NO: 2930 - DNA, 16 bp, Homo sapiens
tcgtccactacaaggt

SEQ ID NO: 2931 - DNA, 16 bp, Homo sapiens
gtccactacaaggtga

SEQ ID NO: 2932 - DNA, 16 bp, Homo sapiens
ccactacaaggtgagc

SEQ ID NO: 2933 - DNA, 16 bp, Homo sapiens
ctatcgcctcctctcc

SEQ ID NO: 2934 - DNA, 16 bp, Homo sapiens
atcgcctcctctccct

SEQ ID NO: 2935 - DNA, 16 bp, Homo sapiens
tccctctgagcaggag

SEQ ID NO: 2936 - DNA, 16 bp, Homo sapiens
ctctgagcaggagcac

SEQ ID NO: 2937 - DNA, 16 bp, Homo sapiens
ctgagcaggagcacct

SEQ ID NO: 2938 - DNA, 16 bp, Homo sapiens
gagcaggagcacctct

SEQ ID NO: 2939 - DNA, 16 bp, Homo sapiens
gcaggagcacctctct

SEQ ID NO: 2940 - DNA, 16 bp, Homo sapiens
tgagcgggggcggggt

SEQ ID NO: 2941 - DNA, 16 bp, Homo sapiens
agcgggggcggggtag

SEQ ID NO: 2942 - DNA, 16 bp, Homo sapiens
cgggggcggggtaggt

SEQ ID NO: 2943 - DNA, 16 bp, Homo sapiens
ggggcggggtaggtac

SEQ ID NO: 2944 - DNA, 16 bp, Homo sapiens
ggcggggtaggtacct

SEQ ID NO: 2945 - DNA, 16 bp, Homo sapiens
gctgcgggaacctccc

SEQ ID NO: 2946 - DNA, 16 bp, Homo sapiens
aagttggagtaaggac

SEQ ID NO: 2947 - DNA, 16 bp, Homo sapiens
gttggagtaaggacag

SEQ ID NO: 2948 - DNA, 16 bp, Homo sapiens
tggagtaaggacagtg

SEQ ID NO: 2949 - DNA, 16 bp, Homo sapiens
gagtaaggacagtgcc

SEQ ID NO: 2950 - DNA, 16 bp, Homo sapiens
gtaaggacagtgccta

SEQ ID NO: 2951 - DNA, 16 bp, Homo sapiens
aaggacagtgcctacc

SEQ ID NO: 2952 - DNA, 16 bp, Homo sapiens
aggacccagcagtgac

SEQ ID NO: 2953 - DNA, 16 bp, Homo sapiens
gacccagcagtgacct

SEQ ID NO: 2954 - DNA, 16 bp, Homo sapiens
cccagcagtgacctag

SEQ ID NO: 2955 - DNA, 16 bp, Homo sapiens
cagcagtgacctagac

SEQ ID NO: 2956 - DNA, 16 bp, Homo sapiens
gcagtgacctagactt

SEQ ID NO: 2957 - DNA, 16 bp, Homo sapiens
tgagacaatggagtgc

SEQ ID NO: 2958 - DNA, 16 bp, Homo sapiens
agacaatggagtgcag

SEQ ID NO: 2959 - DNA, 16 bp, Homo sapiens
acaatggagtgcaggg

SEQ ID NO: 2960 - DNA, 16 bp, Homo sapiens
aatggagtgcaggggg

SEQ ID NO: 2961 - DNA, 16 bp, Homo sapiens
ctcctgactcagcaag

SEQ ID NO: 2962 - DNA, 16 bp, Homo sapiens
cctgactcagcaagga

SEQ ID NO: 2963 - DNA, 16 bp, Homo sapiens
tgactcagcaaggaag

SEQ ID NO: 2964 - DNA, 16 bp, Homo sapiens
actcagcaaggaaggt

SEQ ID NO: 2965 - DNA, 16 bp, Homo sapiens
tcagcaaggaaggtcc

SEQ ID NO: 2966 - DNA, 16 bp, Homo sapiens
agcaaggaaggtcctg

SEQ ID NO: 2967 - DNA, 16 bp, Homo sapiens
aaggtcctggagggct

SEQ ID NO: 2968 - DNA, 16 bp, Homo sapiens
ctggagtggggagcta

SEQ ID NO: 2969 - DNA, 16 bp, Homo sapiens
ggagtggggagctatc

SEQ ID NO: 2970 - DNA, 16 bp, Homo sapiens
agtggggagctatctg

SEQ ID NO: 2971 - DNA, 16 bp, Homo sapiens
tggggagctatctgag

SEQ ID NO: 2972 - DNA, 16 bp, Homo sapiens
gggagctatctgagct

SEQ ID NO: 2973 - DNA, 16 bp, Homo sapiens
gagctatctgagctga

SEQ ID NO: 2974 - DNA, 16 bp, Homo sapiens
gctatctgagctgaga

SEQ ID NO: 2975 - DNA, 16 bp, Homo sapiens
aagcaggagaggactc

SEQ ID NO: 2976 - DNA, 16 bp, Homo sapiens
aggagaggactcctcc

SEQ ID NO: 2977 - DNA, 16 bp, Homo sapiens
gagaggactcctcctc

SEQ ID NO: 2978 - DNA, 16 bp, Homo sapiens
tctgggtgcccttttg

SEQ ID NO: 2979 - DNA, 16 bp, Homo sapiens
tgggtgcccttttgct

SEQ ID NO: 2980 - DNA, 16 bp, Homo sapiens
acaatactggggatcc

SEQ ID NO: 2981 - DNA, 16 bp, Homo sapiens
aatactggggatccag

SEQ ID NO: 2982 - DNA, 16 bp, Homo sapiens
tactggggatccagca

SEQ ID NO: 2983 - DNA, 16 bp, Homo sapiens
ttgcagtctagagaat

SEQ ID NO: 2984 - DNA, 16 bp, Homo sapiens
gcagtctagagaatta

SEQ ID NO: 2985 - DNA, 16 bp, Homo sapiens
agtctagagaattaga

SEQ ID NO: 2986 - DNA, 16 bp, Homo sapiens
tctagagaattagaga

SEQ ID NO: 2987 - DNA, 16 bp, Homo sapiens
ttagagaattatggag

SEQ ID NO: 2988 - DNA, 16 bp, Homo sapiens
gagaattatggagagt

SEQ ID NO: 2989 - DNA, 16 bp, Homo sapiens
gaattatggagagtgt

SEQ ID NO: 2990 - DNA, 16 bp, Homo sapiens
attatggagagtgtgg

SEQ ID NO: 2991 - DNA, 16 bp, Homo sapiens
tatggagagtgtggca

SEQ ID NO: 2992 - DNA, 16 bp, Homo sapiens
gcaggatgggcatggg

SEQ ID NO: 2993 - DNA, 16 bp, Homo sapiens
caacatttctctgtcc

SEQ ID NO: 2994 - DNA, 16 bp, Homo sapiens
ttctctgtcctatgcc

SEQ ID NO: 2995 - DNA, 16 bp, Homo sapiens
ctctgtcctatgccac

SEQ ID NO: 2996 - DNA, 16 bp, Homo sapiens
ctgtcctatgccacca

SEQ ID NO: 2997 - DNA, 16 bp, Homo sapiens
ggaggggcagagtaag

SEQ ID NO: 2998 - DNA, 16 bp, Homo sapiens
aggggcagagtaaggt

SEQ ID NO: 2999 - DNA, 16 bp, Homo sapiens
gggcagagtaaggtca

SEQ ID NO: 3000 - DNA, 16 bp, Homo sapiens
gcagagtaaggtcagc

SEQ ID NO: 3001 - DNA, 16 bp, Homo sapiens
agagtaaggtcagcag

SEQ ID NO: 3002 - DNA, 16 bp, Homo sapiens
agtaaggtcagcagag

SEQ ID NO: 3003 - DNA, 16 bp, Homo sapiens
taaggtcagcagaggc

SEQ ID NO: 3004 - DNA, 16 bp, Homo sapiens
tgactcagagccatgg

SEQ ID NO: 3005 - DNA, 16 bp, Homo sapiens
actcagagccatggct

SEQ ID NO: 3006 - DNA, 16 bp, Homo sapiens
tcagagccatggctta

SEQ ID NO: 3007 - DNA, 16 bp, Homo sapiens
gagtcacagcaggcta

SEQ ID NO: 3008 - DNA, 16 bp, Homo sapiens
gccaacagcctcccat

SEQ ID NO: 3009 - DNA, 16 bp, Homo sapiens
caacagcctcccatgg

SEQ ID NO: 3010 - DNA, 16 bp, Homo sapiens
acagcctcccatggcc

SEQ ID NO: 3011 - DNA, 16 bp, Homo sapiens
catggcctctctgcac

SEQ ID NO: 3012 - DNA, 16 bp, Homo sapiens
gtcatgctgggagctc

SEQ ID NO: 3013 - DNA, 16 bp, Homo sapiens
atgctgggagctccct

SEQ ID NO: 3014 - DNA, 16 bp, Homo sapiens
aagtgggctctatggc

SEQ ID NO: 3015 - DNA, 16 bp, Homo sapiens
gtgggctctatggccc

SEQ ID NO: 3016 - DNA, 16 bp, Homo sapiens
ccaggagggccagcat

SEQ ID NO: 3017 - DNA, 16 bp, Homo sapiens
ccagcatggggcagct

SEQ ID NO: 3018 - DNA, 16 bp, Homo sapiens
gcagctgccaggggcg

SEQ ID NO: 3019 - DNA, 16 bp, Homo sapiens
agctgccaggggcgca

SEQ ID NO: 3020 - DNA, 16 bp, Homo sapiens
ctgccaggggcgcagc

SEQ ID NO: 3021 - DNA, 16 bp, Homo sapiens
gccaggggcgcagccg

SEQ ID NO: 3022 - DNA, 16 bp, Homo sapiens
caggggcgcagccgac

SEQ ID NO: 3023 - DNA, 16 bp, Homo sapiens
ggggcgcagccgacag

SEQ ID NO: 3024 - DNA, 16 bp, Homo sapiens
ggcgcagccgacaggc

SEQ ID NO: 3025 - DNA, 16 bp, Homo sapiens
cgcagccgacaggcag

SEQ ID NO: 3026 - DNA, 16 bp, Homo sapiens
cagccgacaggcaggt

SEQ ID NO: 3027 - DNA, 16 bp, Homo sapiens
gccgacaggcaggtgt

SEQ ID NO: 3028 - DNA, 16 bp, Homo sapiens
cgacaggcaggtgttc

SEQ ID NO: 3029 - DNA, 16 bp, Homo sapiens
acaggcaggtgttcgg

SEQ ID NO: 3030 - DNA, 16 bp, Homo sapiens
aggcaggtgttcggcg

SEQ ID NO: 3031 - DNA, 16 bp, Homo sapiens
ccaacaggtgcccagg

SEQ ID NO: 3032 - DNA, 16 bp, Homo sapiens
acaggtgcccaggcac

SEQ ID NO: 3033 - DNA, 16 bp, Homo sapiens
aggcactgggagggcg

SEQ ID NO: 3034 - DNA, 16 bp, Homo sapiens
gcactgggagggcggt

SEQ ID NO: 3035 - DNA, 16 bp, Homo sapiens
actgggagggcggtga

SEQ ID NO: 3036 - DNA, 16 bp, Homo sapiens
tgggagggcggtgact

SEQ ID NO: 3037 - DNA, 16 bp, Homo sapiens
ggagggcggtgactca

SEQ ID NO: 3038 - DNA, 16 bp, Homo sapiens
agggcggtgactcacg

SEQ ID NO: 3039 - DNA, 16 bp, Homo sapiens
gggagaaccagctttg

SEQ ID NO: 3040 - DNA, 16 bp, Homo sapiens
gagaaccagctttgca

SEQ ID NO: 3041 - DNA, 16 bp, Homo sapiens
gaaccagctttgcaga

SEQ ID NO: 3042 - DNA, 16 bp, Homo sapiens
accagctttgcagaca

SEQ ID NO: 3043 - DNA, 16 bp, Homo sapiens
cagctttgcagacagg

SEQ ID NO: 3044 - DNA, 16 bp, Homo sapiens
gctttgcagacaggcg

SEQ ID NO: 3045 - DNA, 16 bp, Homo sapiens
gatccaggagggacaa

SEQ ID NO: 3046 - DNA, 16 bp, Homo sapiens
tccaggagggacaact

SEQ ID NO: 3047 - DNA, 16 bp, Homo sapiens
caggagggacaacttt

SEQ ID NO: 3048 - DNA, 16 bp, Homo sapiens
ggagggacaactttgg

SEQ ID NO: 3049 - DNA, 16 bp, Homo sapiens
agggacaactttgggt

SEQ ID NO: 3050 - DNA, 16 bp, Homo sapiens
ggacaactttgggttc

SEQ ID NO: 3051 - DNA, 16 bp, Homo sapiens
caactttgggttcttc

SEQ ID NO: 3052 - DNA, 16 bp, Homo sapiens
ctttgggttcttctgg

SEQ ID NO: 3053 - DNA, 16 bp, Homo sapiens
tgggttcttctgggtg

SEQ ID NO: 3054 - DNA, 16 bp, Homo sapiens
cttttgtaggttctgc

SEQ ID NO: 3055 - DNA, 16 bp, Homo sapiens
tttgtaggttctgcac

SEQ ID NO: 3056 - DNA, 16 bp, Homo sapiens
tgtaggttctgcaccc

SEQ ID NO: 3057 - DNA, 16 bp, Homo sapiens
taggttctgcacccac

SEQ ID NO: 3058 - DNA, 16 bp, Homo sapiens
cctatgagccgtgtgg

SEQ ID NO: 3059 - DNA, 16 bp, Homo sapiens
tatgagccgtgtgggt

SEQ ID NO: 3060 - DNA, 16 bp, Homo sapiens
tgagccgtgtgggtca

SEQ ID NO: 3061 - DNA, 16 bp, Homo sapiens
agccgtgtgggtcagc

SEQ ID NO: 3062 - DNA, 16 bp, Homo sapiens
ccgtgtgggtcagcca

SEQ ID NO: 3063 - DNA, 16 bp, Homo sapiens
gtgtgggtcagccacc

SEQ ID NO: 3064 - DNA, 16 bp, Homo sapiens
gtgggtcagccaccat

SEQ ID NO: 3065 - DNA, 16 bp, Homo sapiens
gggtcagccaccattc

SEQ ID NO: 3066 - DNA, 16 bp, Homo sapiens
tccctgcgtcctttag

SEQ ID NO: 3067 - DNA, 16 bp, Homo sapiens
cctgcgtcctttagtt

SEQ ID NO: 3068 - DNA, 16 bp, Homo sapiens
gcgtcctttagttctc

SEQ ID NO: 3069 - DNA, 16 bp, Homo sapiens
ggggcttgggaccaat

SEQ ID NO: 3070 - DNA, 16 bp, Homo sapiens
ggcttgggaccaatgg

SEQ ID NO: 3071 - DNA, 16 bp, Homo sapiens
cttgggaccaatgggc

SEQ ID NO: 3072 - DNA, 16 bp, Homo sapiens
tgggaccaatgggcgt

SEQ ID NO: 3073 - DNA, 16 bp, Homo sapiens
ggaccaatgggcgtgg

SEQ ID NO: 3074 - DNA, 16 bp, Homo sapiens
accaatgggcgtggtg

SEQ ID NO: 3075 - DNA, 16 bp, Homo sapiens
gggtggagttgggtct

SEQ ID NO: 3076 - DNA, 16 bp, Homo sapiens
aagaggggcgaggtga

SEQ ID NO: 3077 - DNA, 16 bp, Homo sapiens
gaggggcgaggtgagg

SEQ ID NO: 3078 - DNA, 16 bp, Homo sapiens
ggcgaggtgaggggct

SEQ ID NO: 3079 - DNA, 16 bp, Homo sapiens
cgtggggggctttgag

SEQ ID NO: 3080 - DNA, 16 bp, Homo sapiens
ggggggctttgaggat

SEQ ID NO: 3081 - DNA, 16 bp, Homo sapiens
ggggctttgaggatcc

SEQ ID NO: 3082 - DNA, 16 bp, Homo sapiens
ggctttgaggatccgc

SEQ ID NO: 3083 - DNA, 16 bp, Homo sapiens
ctttgaggatccgcgc

SEQ ID NO: 3084 - DNA, 16 bp, Homo sapiens
ttgaggatccgcgccc

SEQ ID NO: 3085 - DNA, 16 bp, Homo sapiens
tctccggctgcagctc

SEQ ID NO: 3086 - DNA, 16 bp, Homo sapiens
tccggctgcagctcct

SEQ ID NO: 3087 - DNA, 16 bp, Homo sapiens
ggctgcagctcctccg

SEQ ID NO: 3088 - DNA, 16 bp, Homo sapiens
tgcagctcctccgggt

SEQ ID NO: 3089 - DNA, 16 bp, Homo sapiens
cagctcctccgggtgc

SEQ ID NO: 3090 - DNA, 16 bp, Homo sapiens
gctcctccgggtgccc

SEQ ID NO: 3091 - DNA, 16 bp, Homo sapiens
tcctccgggtgccctg

SEQ ID NO: 3092 - DNA, 16 bp, Homo sapiens
ctccgggtgccctgca

SEQ ID NO: 3093 - DNA, 16 bp, Homo sapiens
ccgggtgccctgcagg

SEQ ID NO: 3094 - DNA, 16 bp, Homo sapiens
tgccctgcaggtgtcg

SEQ ID NO: 3095 - DNA, 16 bp, Homo sapiens
ccctgcaggtgtcgtg

SEQ ID NO: 3096 - DNA, 16 bp, Homo sapiens
ctgcaggtgtcgtgct

SEQ ID NO: 3097 - DNA, 16 bp, Homo sapiens
gcaggtgtcgtgcttc

SEQ ID NO: 3098 - DNA, 16 bp, Homo sapiens
gatgagaactacctgg

SEQ ID NO: 3099 - DNA, 16 bp, Homo sapiens
tgagaactacctggtg

SEQ ID NO: 3100 - DNA, 16 bp, Homo sapiens
agaactacctggtgag

SEQ ID NO: 3101 - DNA, 16 bp, Homo sapiens
aactacctggtgagct

SEQ ID NO: 3102 - DNA, 16 bp, Homo sapiens
ctacctggtgagctcc

SEQ ID NO: 3103 - DNA, 16 bp, Homo sapiens
acctggtgagctccgg

SEQ ID NO: 3104 - DNA, 16 bp, Homo sapiens
ctggtgagctccgggc

SEQ ID NO: 3105 - DNA, 16 bp, Homo sapiens
gggagaggaagctcta

SEQ ID NO: 3106 - DNA, 16 bp, Homo sapiens
gagaggaagctctagg

SEQ ID NO: 3107 - DNA, 16 bp, Homo sapiens
gaggaagctctaggat

SEQ ID NO: 3108 - DNA, 16 bp, Homo sapiens
ggaagctctaggattg

SEQ ID NO: 3109 - DNA, 16 bp, Homo sapiens
aagctctaggattggg

SEQ ID NO: 3110 - DNA, 16 bp, Homo sapiens
gctctaggattggggg

SEQ ID NO: 3111 - DNA, 16 bp, Homo sapiens
tctaggattgggggtg

SEQ ID NO: 3112 - DNA, 16 bp, Homo sapiens
taggattgggggtgct

SEQ ID NO: 3113 - DNA, 16 bp, Homo sapiens
ggattgggggtgctgc

SEQ ID NO: 3114 - DNA, 16 bp, Homo sapiens
attgggggtgctgccc

SEQ ID NO: 3115 - DNA, 16 bp, Homo sapiens
gtaagagggtgtgtca

SEQ ID NO: 3116 - DNA, 16 bp, Homo sapiens
aagagggtgtgtcagg

SEQ ID NO: 3117 - DNA, 16 bp, Homo sapiens
gagggtgtgtcaggtg

SEQ ID NO: 3118 - DNA, 16 bp, Homo sapiens
gggtgtgtcaggtgga

SEQ ID NO: 3119 - DNA, 16 bp, Homo sapiens
gtgtgtcaggtggatg

SEQ ID NO: 3120 - DNA, 16 bp, Homo sapiens
gtgtcaggtggatgag

SEQ ID NO: 3121 - DNA, 16 bp, Homo sapiens
gtcaggtggatgaggg

SEQ ID NO: 3122 - DNA, 16 bp, Homo sapiens
caggtggatgaggggc

SEQ ID NO: 3123 - DNA, 16 bp, Homo sapiens
ggtggatgaggggcct

SEQ ID NO: 3124 - DNA, 16 bp, Homo sapiens
tggatgaggggccttc

SEQ ID NO: 3125 - DNA, 16 bp, Homo sapiens
ggggggtctcttacct

SEQ ID NO: 3126 - DNA, 16 bp, Homo sapiens
ggggtctcttacctgg

SEQ ID NO: 3127 - DNA, 16 bp, Homo sapiens
ggtctcttacctggaa

SEQ ID NO: 3128 - DNA, 16 bp, Homo sapiens
ctcttacctggaatgg

SEQ ID NO: 3129 - DNA, 16 bp, Homo sapiens
cttacctggaatggga

SEQ ID NO: 3130 - DNA, 16 bp, Homo sapiens
tacctggaatgggata

SEQ ID NO: 3131 - DNA, 16 bp, Homo sapiens
cctggaatgggatagg

SEQ ID NO: 3132 - DNA, 16 bp, Homo sapiens
tggaatgggataggtc

SEQ ID NO: 3133 - DNA, 16 bp, Homo sapiens
gaatgggataggtctt

SEQ ID NO: 3134 - DNA, 16 bp, Homo sapiens
atgggataggtcttca

SEQ ID NO: 3135 - DNA, 16 bp, Homo sapiens
aattctaacggggcca

SEQ ID NO: 3136 - DNA, 16 bp, Homo sapiens
ttctaacggggccact

SEQ ID NO: 3137 - DNA, 16 bp, Homo sapiens
ctaacggggccactgc

SEQ ID NO: 3138 - DNA, 16 bp, Homo sapiens
aacggggccactgcct

SEQ ID NO: 3139 - DNA, 16 bp, Homo sapiens
cggggccactgcctag

SEQ ID NO: 3140 - DNA, 16 bp, Homo sapiens
gggccactgcctaggg

SEQ ID NO: 3141 - DNA, 16 bp, Homo sapiens
ggagtgtctgggacct

SEQ ID NO: 3142 - DNA, 16 bp, Homo sapiens
agtgtctgggacctat

SEQ ID NO: 3143 - DNA, 16 bp, Homo sapiens
tgtctgggacctattc

SEQ ID NO: 3144 - DNA, 16 bp, Homo sapiens
tctgggacctattctc

SEQ ID NO: 3145 - DNA, 16 bp, Homo sapiens
tgggacctattctctg

SEQ ID NO: 3146 - DNA, 20 bp, Homo sapiens
acaggcagacatgcagccag

SEQ ID NO: 3147 - DNA, 20 bp, Homo sapiens
cctgctcgaccttctcctgg

SEQ ID NO: 3148 - DNA, 20 bp, Homo sapiens
gagattgtcatggccataga

SEQ ID NO: 3149 - DNA, 20 bp, Homo sapiens
ggctacgtgcacagggacat

SEQ ID NO: 3150 - DNA, 20 bp, Homo sapiens
caggcgacttccggacacat

SEQ ID NO: 3151 - DNA, 20 bp, Homo sapiens
ctcacccggcagagcctgag

SEQ ID NO: 3152 - DNA, 20 bp, Homo sapiens
cgtggctgtgggccagtgcc

SEQ ID NO: 3153 - DNA, 20 bp, Homo sapiens
atttctttctttcggccagg

SEQ ID NO: 3154 - DNA, 20 bp, Homo sapiens
ggatcacagaccatttcttt

SEQ ID NO: 3155 - DNA, 20 bp, Homo sapiens
tcacagaccatttctttctt

SEQ ID NO: 3156 - DNA, 20 bp, Homo sapiens
accatttctttctttcggcc

SEQ ID NO: 3157 - DNA, 20 bp, Homo sapiens
ttctttcggccaggctgagg

SEQ ID NO: 3158 - DNA, 20 bp, Homo sapiens
tttcggccaggctgaggccc

SEQ ID NO: 3159 - DNA, 20 bp, Homo sapiens
cggccaggctgaggccctga

SEQ ID NO: 3160 - DNA, 20 bp, Homo sapiens
cgtggatgggcaaactgcag

SEQ ID NO: 3161 - DNA, 20 bp, Homo sapiens
ggatgggcaaactgcaggcc

SEQ ID NO: 3162 - DNA, 20 bp, Homo sapiens
tgggcaaactgcaggcctgg

SEQ ID NO: 3163 - DNA, 20 bp, Homo sapiens
aactgcaggcctgggaaggc

SEQ ID NO: 3164 - DNA, 20 bp, Homo sapiens
tgcaggcctgggaaggcagc

SEQ ID NO: 3165 - DNA, 20 bp, Homo sapiens
aggcctgggaaggcagcaag

SEQ ID NO: 3166 - DNA, 20 bp, Homo sapiens
gggaaggcagcaagccgggc

SEQ ID NO: 3167 - DNA, 20 bp, Homo sapiens
aaggcagcaagccgggccgt

SEQ ID NO: 3168 - DNA, 20 bp, Homo sapiens
gcagcaagccgggccgtccg

SEQ ID NO: 3169 - DNA, 20 bp, Homo sapiens
gcaagccgggccgtccgtgt

SEQ ID NO: 3170 - DNA, 20 bp, Homo sapiens
cgggccgtccgtgttccatc

SEQ ID NO: 3171 - DNA, 20 bp, Homo sapiens
gccgtccgtgttccatcctc

SEQ ID NO: 3172 - DNA, 20 bp, Homo sapiens
gtccgtgttccatcctccac

SEQ ID NO: 3173 - DNA, 20 bp, Homo sapiens
cccacctatcgttggttcgc

SEQ ID NO: 3174 - DNA, 20 bp, Homo sapiens
acctatcgttggttcgcaaa

SEQ ID NO: 3175 - DNA, 20 bp, Homo sapiens
tggttcgcaaagtgcaaagc

SEQ ID NO: 3176 - DNA, 20 bp, Homo sapiens
ttcgcaaagtgcaaagcttt

SEQ ID NO: 3177 - DNA, 20 bp, Homo sapiens
aagtgcaaagctttcttgtg

SEQ ID NO: 3178 - DNA, 20 bp, Homo sapiens
aaagctttcttgtgcatgac

SEQ ID NO: 3179 - DNA, 20 bp, Homo sapiens
cgccctgctctggggagcgt

SEQ ID NO: 3180 - DNA, 20 bp, Homo sapiens
gcgtctggcgcgatctctgc

SEQ ID NO: 3181 - DNA, 20 bp, Homo sapiens
tctggcgcgatctctgcctg

SEQ ID NO: 3182 - DNA, 20 bp, Homo sapiens
ggcgcgatctctgcctgctt

SEQ ID NO: 3183 - DNA, 20 bp, Homo sapiens
atctctgcctgcttactcgg

SEQ ID NO: 3184 - DNA, 20 bp, Homo sapiens
tctgcctgcttactcgggaa

SEQ ID NO: 3185 - DNA, 20 bp, Homo sapiens
tgcttactcgggaaatttgc

SEQ ID NO: 3186 - DNA, 20 bp, Homo sapiens
ttactcgggaaatttgcttt

SEQ ID NO: 3187 - DNA, 20 bp, Homo sapiens
gggaaatttgcttttgccaa

SEQ ID NO: 3188 - DNA, 20 bp, Homo sapiens
aaatttgcttttgccaaacc

SEQ ID NO: 3189 - DNA, 20 bp, Homo sapiens
tttgcttttgccaaacccgc

SEQ ID NO: 3190 - DNA, 20 bp, Homo sapiens
gcttttgccaaacccgcttt

SEQ ID NO: 3191 - DNA, 20 bp, Homo sapiens
gccaaacccgctttttcggg

SEQ ID NO: 3192 - DNA, 20 bp, Homo sapiens
aaacccgctttttcggggat

SEQ ID NO: 3193 - DNA, 20 bp, Homo sapiens
ccgctttttcggggatcccg

SEQ ID NO: 3194 - DNA, 20 bp, Homo sapiens
ctttttcggggatcccgcgc

SEQ ID NO: 3195 - DNA, 20 bp, Homo sapiens
tcctcacttgcgctgctctc

SEQ ID NO: 3196 - DNA, 20 bp, Homo sapiens
tcacttgcgctgctctcgga

SEQ ID NO: 3197 - DNA, 20 bp, Homo sapiens
cttgcgctgctctcggagcc

SEQ ID NO: 3198 - DNA, 20 bp, Homo sapiens
ccagccggctccgcccgctt

SEQ ID NO: 3199 - DNA, 20 bp, Homo sapiens
gccggctccgcccgcttcgg

SEQ ID NO: 3200 - DNA, 20 bp, Homo sapiens
tccgcccgcttcggcggttt

SEQ ID NO: 3201 - DNA, 20 bp, Homo sapiens
gcccgcttcggcggtttgga

SEQ ID NO: 3202 - DNA, 20 bp, Homo sapiens
cgcttcggcggtttggatat

SEQ ID NO: 3203 - DNA, 20 bp, Homo sapiens
ttcggcggtttggatattta

SEQ ID NO: 3204 - DNA, 20 bp, Homo sapiens
ggcggtttggatatttattg

SEQ ID NO: 3205 - DNA, 20 bp, Homo sapiens
ttggatatttattgacctcg

SEQ ID NO: 3206 - DNA, 20 bp, Homo sapiens
gatatttattgacctcgtcc

SEQ ID NO: 3207 - DNA, 20 bp, Homo sapiens
atttattgacctcgtcctcc

SEQ ID NO: 3208 - DNA, 20 bp, Homo sapiens
tgacctcgtcctccgactcg

SEQ ID NO: 3209 - DNA, 20 bp, Homo sapiens
cgtcctccgactcgctgaca

SEQ ID NO: 3210 - DNA, 20 bp, Homo sapiens
cctccgactcgctgacaggc

SEQ ID NO: 3211 - DNA, 20 bp, Homo sapiens
ccgactcgctgacaggctac

SEQ ID NO: 3212 - DNA, 20 bp, Homo sapiens
actcgctgacaggctacagg

SEQ ID NO: 3213 - DNA, 20 bp, Homo sapiens
cgctgacaggctacaggacc

SEQ ID NO: 3214 - DNA, 20 bp, Homo sapiens
cccgacattcctcggtattt

SEQ ID NO: 3215 - DNA, 20 bp, Homo sapiens
gacattcctcggtatttatt

SEQ ID NO: 3216 - DNA, 20 bp, Homo sapiens
attcctcggtatttattgtc

SEQ ID NO: 3217 - DNA, 20 bp, Homo sapiens
tcttcgactccggggccccg

SEQ ID NO: 3218 - DNA, 20 bp, Homo sapiens
cgactccggggccccgttgg

SEQ ID NO: 3219 - DNA, 20 bp, Homo sapiens
actccggggccccgttggaa

SEQ ID NO: 3220 - DNA, 20 bp, Homo sapiens
ccggggccccgttggaagac

SEQ ID NO: 3221 - DNA, 20 bp, Homo sapiens
ggggccccgttggaagactg

SEQ ID NO: 3222 - DNA, 20 bp, Homo sapiens
ggccccgttggaagactgag

SEQ ID NO: 3223 - DNA, 20 bp, Homo sapiens
cccgttggaagactgagtgc

SEQ ID NO: 3224 - DNA, 20 bp, Homo sapiens
ggaagactgagtgcccgggg

SEQ ID NO: 3225 - DNA, 20 bp, Homo sapiens
aagactgagtgcccggggca

SEQ ID NO: 3226 - DNA, 20 bp, Homo sapiens
gactgagtgcccggggcacg

SEQ ID NO: 3227 - DNA, 20 bp, Homo sapiens
gagtgcccggggcacggcac

SEQ ID NO: 3228 - DNA, 20 bp, Homo sapiens
tgcccggggcacggcacaga

SEQ ID NO: 3229 - DNA, 20 bp, Homo sapiens
ccggggcacggcacagaagc

SEQ ID NO: 3230 - DNA, 20 bp, Homo sapiens
gggcacggcacagaagccgc

SEQ ID NO: 3231 - DNA, 20 bp, Homo sapiens
gcacggcacagaagccgcgc

SEQ ID NO: 3232 - DNA, 20 bp, Homo sapiens
acggcacagaagccgcgccc

SEQ ID NO: 3233 - DNA, 20 bp, Homo sapiens
cagaagccgcgcccaccgcc

SEQ ID NO: 3234 - DNA, 20 bp, Homo sapiens
agccgcgcccaccgcctgcc

SEQ ID NO: 3235 - DNA, 20 bp, Homo sapiens
ccgcgcccaccgcctgccag

SEQ ID NO: 3236 - DNA, 20 bp, Homo sapiens
gcgcccaccgcctgccagtt

SEQ ID NO: 3237 - DNA, 20 bp, Homo sapiens
cccaccgcctgccagttcac

SEQ ID NO: 3238 - DNA, 20 bp, Homo sapiens
ccgcctgccagttcacaacc

SEQ ID NO: 3239 - DNA, 20 bp, Homo sapiens
gcctgccagttcacaaccgc

SEQ ID NO: 3240 - DNA, 20 bp, Homo sapiens
gttcacaaccgctccgagcg

SEQ ID NO: 3241 - DNA, 20 bp, Homo sapiens
acaaccgctccgagcgtggg

SEQ ID NO: 3242 - DNA, 20 bp, Homo sapiens
accgctccgagcgtgggtct

SEQ ID NO: 3243 - DNA, 20 bp, Homo sapiens
gctccgagcgtgggtctccg

SEQ ID NO: 3244 - DNA, 20 bp, Homo sapiens
ccgagcgtgggtctccgccc

SEQ ID NO: 3245 - DNA, 20 bp, Homo sapiens
agcgtgggtctccgcccagc

SEQ ID NO: 3246 - DNA, 20 bp, Homo sapiens
gtgggtctccgcccagctcc

SEQ ID NO: 3247 - DNA, 20 bp, Homo sapiens
gggtctccgcccagctccag

SEQ ID NO: 3248 - DNA, 20 bp, Homo sapiens
tctccgcccagctccagtcc

SEQ ID NO: 3249 - DNA, 20 bp, Homo sapiens
tccgcccagctccagtcctg

SEQ ID NO: 3250 - DNA, 20 bp, Homo sapiens
cccagctccagtcctgtgat

SEQ ID NO: 3251 - DNA, 20 bp, Homo sapiens
cctgtgatccgggcccgccc

SEQ ID NO: 3252 - DNA, 20 bp, Homo sapiens
tgtgatccgggcccgccccc

SEQ ID NO: 3253 - DNA, 20 bp, Homo sapiens
gaggggccatggtgctgcct

SEQ ID NO: 3254 - DNA, 20 bp, Homo sapiens
ccagcagctggtgttggacc

SEQ ID NO: 3255 - DNA, 20 bp, Homo sapiens
cgagattctgaaggtgatcg

SEQ ID NO: 3256 - DNA, 20 bp, Homo sapiens
ccatgaagatcatgaacaag

SEQ ID NO: 3257 - DNA, 20 bp, Homo sapiens
ggacgtgttggtgaatgggg

SEQ ID NO: 3258 - DNA, 20 bp, Homo sapiens
ggaccggcggtggatcacgc

SEQ ID NO: 3259 - DNA, 20 bp, Homo sapiens
acctggtcatggagtattac

SEQ ID NO: 3260 - DNA, 20 bp, Homo sapiens
cggggacctgctgacactgc

SEQ ID NO: 3261 - DNA, 20 bp, Homo sapiens
tcatggccatagactcggtg

SEQ ID NO: 3262 - DNA, 20 bp, Homo sapiens
gtgcaccggcttggctacgt

SEQ ID NO: 3263 - DNA, 20 bp, Homo sapiens
ctggaccgctgtggccacat

SEQ ID NO: 3264 - DNA, 20 bp, Homo sapiens
tctgccgctggtggacgaag

SEQ ID NO: 3265 - DNA, 20 bp, Homo sapiens
cgctggtggacgaaggggtc

SEQ ID NO: 3266 - DNA, 20 bp, Homo sapiens
ctgggccggggtggagcagg

SEQ ID NO: 3267 - DNA, 20 bp, Homo sapiens
ggtggagcaggcgacttccg

SEQ ID NO: 3268 - DNA, 20 bp, Homo sapiens
ctcgactgggatggtctccg

SEQ ID NO: 3269 - DNA, 20 bp, Homo sapiens
ctactcctgcatggccctca

SEQ ID NO: 3270 - DNA, 20 bp, Homo sapiens
ccacacccatggaactggag

SEQ ID NO: 3271 - DNA, 20 bp, Homo sapiens
tgagccacacgtgcaagcgc

SEQ ID NO: 3272 - DNA, 20 bp, Homo sapiens
gatgaaacagctgaagtggc

SEQ ID NO: 3273 - DNA, 20 bp, Homo sapiens
cctgcggcagaggctgaggc

SEQ ID NO: 3274 - DNA, 20 bp, Homo sapiens
tgaggccgaggtgacgctgc

SEQ ID NO: 3275 - DNA, 20 bp, Homo sapiens
cacccggcagagcctgagcc

SEQ ID NO: 3276 - DNA, 20 bp, Homo sapiens
cgcgaggcagaggctcggaa

SEQ ID NO: 3277 - DNA, 20 bp, Homo sapiens
agaggctcggaaccgggacc

SEQ ID NO: 3278 - DNA, 20 bp, Homo sapiens
cggcagttgcaggagcggat

SEQ ID NO: 3279 - DNA, 20 bp, Homo sapiens
gcaggagcggatggagttgc

SEQ ID NO: 3280 - DNA, 20 bp, Homo sapiens
cccgggccacggatccacct

SEQ ID NO: 3281 - DNA, 20 bp, Homo sapiens
ggcacggcacagaagccgcg

SEQ ID NO: 3282 - DNA, 20 bp, Homo sapiens
caggcctgggaaggcagcaa

SEQ ID NO: 3283 - DNA, 20 bp, Homo sapiens
catatgtctggccctcagtg

SEQ ID NO: 3284 - DNA, 20 bp, Homo sapiens
acctgcatctgaatctagag

SEQ ID NO: 3285 - DNA, 20 bp, Homo sapiens
ctggacaggggctgccaggc

SEQ ID NO: 3286 - DNA, 20 bp, Homo sapiens
tggacaggggctgccaggcc

SEQ ID NO: 3287 - DNA, 20 bp, Homo sapiens
ggacaggggctgccaggccc

SEQ ID NO: 3288 - DNA, 20 bp, Homo sapiens
ccggcccggggaggggccat

SEQ ID NO: 3289 - DNA, 20 bp, Homo sapiens
cggcccggggaggggccatg

SEQ ID NO: 3290 - DNA, 20 bp, Homo sapiens
ggcccggggaggggccatgg

SEQ ID NO: 3291 - DNA, 20 bp, Homo sapiens
gcccggggaggggccatggt

SEQ ID NO: 3292 - DNA, 20 bp, Homo sapiens
cccggggaggggccatggtg

SEQ ID NO: 3293 - DNA, 20 bp, Homo sapiens
ccggggaggggccatggtgc

SEQ ID NO: 3294 - DNA, 20 bp, Homo sapiens
cggggaggggccatggtgct

SEQ ID NO: 3295 - DNA, 20 bp, Homo sapiens
ggggaggggccatggtgctg

SEQ ID NO: 3296 - DNA, 20 bp, Homo sapiens
gggaggggccatggtgctgc

SEQ ID NO: 3297 - DNA, 20 bp, Homo sapiens
ggaggggccatggtgctgcc

SEQ ID NO: 3298 - DNA, 20 bp, Homo sapiens
aggggccatggtgctgcctg

SEQ ID NO: 3299 - DNA, 20 bp, Homo sapiens
ggggccatggtgctgcctgt

SEQ ID NO: 3300 - DNA, 20 bp, Homo sapiens
ggccatggtgctgcctgtcc

SEQ ID NO: 3301 - DNA, 20 bp, Homo sapiens
gccatggtgctgcctgtcca

SEQ ID NO: 3302 - DNA, 20 bp, Homo sapiens
ccatggtgctgcctgtccaa

SEQ ID NO: 3303 - DNA, 20 bp, Homo sapiens
catggtgctgcctgtccaac

SEQ ID NO: 3304 - DNA, 20 bp, Homo sapiens
atggtgctgcctgtccaaca

SEQ ID NO: 3305 - DNA, 20 bp, Homo sapiens
tggtgctgcctgtccaacat

SEQ ID NO: 3306 - DNA, 20 bp, Homo sapiens
ggtgctgcctgtccaacatg

SEQ ID NO: 3307 - DNA, 20 bp, Homo sapiens
gtgctgcctgtccaacatgt

SEQ ID NO: 3308 - DNA, 20 bp, Homo sapiens
tgctgcctgtccaacatgtc

SEQ ID NO: 3309 - DNA, 20 bp, Homo sapiens
gctgcctgtccaacatgtca

SEQ ID NO: 3310 - DNA, 20 bp, Homo sapiens
ctgcctgtccaacatgtcag

SEQ ID NO: 3311 - DNA, 20 bp, Homo sapiens
tgcctgtccaacatgtcagc

SEQ ID NO: 3312 - DNA, 20 bp, Homo sapiens
gcctgtccaacatgtcagcc

SEQ ID NO: 3313 - DNA, 20 bp, Homo sapiens
cctgtccaacatgtcagccg

SEQ ID NO: 3314 - DNA, 20 bp, Homo sapiens
ctgtccaacatgtcagccga

SEQ ID NO: 3315 - DNA, 20 bp, Homo sapiens
tgtccaacatgtcagccgag

SEQ ID NO: 3316 - DNA, 20 bp, Homo sapiens
gtccaacatgtcagccgagg

SEQ ID NO: 3317 - DNA, 20 bp, Homo sapiens
tccaacatgtcagccgaggt

SEQ ID NO: 3318 - DNA, 20 bp, Homo sapiens
ccaacatgtcagccgaggtg

SEQ ID NO: 3319 - DNA, 20 bp, Homo sapiens
caacatgtcagccgaggtgc

SEQ ID NO: 3320 - DNA, 20 bp, Homo sapiens
aacatgtcagccgaggtgcg

SEQ ID NO: 3321 - DNA, 20 bp, Homo sapiens
acatgtcagccgaggtgcgg

SEQ ID NO: 3322 - DNA, 20 bp, Homo sapiens
catgtcagccgaggtgcggc

SEQ ID NO: 3323 - DNA, 20 bp, Homo sapiens
atgtcagccgaggtgcggct

SEQ ID NO: 3324 - DNA, 20 bp, Homo sapiens
tgtcagccgaggtgcggctg

SEQ ID NO: 3325 - DNA, 20 bp, Homo sapiens
gtcagccgaggtgcggctga

SEQ ID NO: 3326 - DNA, 20 bp, Homo sapiens
tcagccgaggtgcggctgag

SEQ ID NO: 3327 - DNA, 20 bp, Homo sapiens
cagccgaggtgcggctgagg

SEQ ID NO: 3328 - DNA, 20 bp, Homo sapiens
agccgaggtgcggctgaggc

SEQ ID NO: 3329 - DNA, 20 bp, Homo sapiens
gctccagcagctggtgttgg

SEQ ID NO: 3330 - DNA, 20 bp, Homo sapiens
ctccagcagctggtgttgga

SEQ ID NO: 3331 - DNA, 20 bp, Homo sapiens
tccagcagctggtgttggac

SEQ ID NO: 3332 - DNA, 20 bp, Homo sapiens
cagcagctggtgttggaccc

SEQ ID NO: 3333 - DNA, 20 bp, Homo sapiens
ggcttcctggggctggagcc

SEQ ID NO: 3334 - DNA, 20 bp, Homo sapiens
gcttcctggggctggagccc

SEQ ID NO: 3335 - DNA, 20 bp, Homo sapiens
ccctgctcgaccttctcctg

SEQ ID NO: 3336 - DNA, 20 bp, Homo sapiens
ctgctcgaccttctcctggg

SEQ ID NO: 3337 - DNA, 20 bp, Homo sapiens
tgctcgaccttctcctgggc

SEQ ID NO: 3338 - DNA, 20 bp, Homo sapiens
gctcgaccttctcctgggcg

SEQ ID NO: 3339 - DNA, 20 bp, Homo sapiens
ctcgaccttctcctgggcgt

SEQ ID NO: 3340 - DNA, 20 bp, Homo sapiens
gcctccgaactggcccagga

SEQ ID NO: 3341 - DNA, 20 bp, Homo sapiens
cctccgaactggcccaggac

SEQ ID NO: 3342 - DNA, 20 bp, Homo sapiens
ctccgaactggcccaggaca

SEQ ID NO: 3343 - DNA, 20 bp, Homo sapiens
tccgaactggcccaggacaa

SEQ ID NO: 3344 - DNA, 20 bp, Homo sapiens
ccgaactggcccaggacaag

SEQ ID NO: 3345 - DNA, 20 bp, Homo sapiens
cgaactggcccaggacaagt

SEQ ID NO: 3346 - DNA, 20 bp, Homo sapiens
gaactggcccaggacaagta

SEQ ID NO: 3347 - DNA, 20 bp, Homo sapiens
aactggcccaggacaagtac

SEQ ID NO: 3348 - DNA, 20 bp, Homo sapiens
actggcccaggacaagtacg

SEQ ID NO: 3349 - DNA, 20 bp, Homo sapiens
cgtggccgacttcttgcagt

SEQ ID NO: 3350 - DNA, 20 bp, Homo sapiens
tggccgacttcttgcagtgg

SEQ ID NO: 3351 - DNA, 20 bp, Homo sapiens
ggccgacttcttgcagtggg

SEQ ID NO: 3352 - DNA, 20 bp, Homo sapiens
gccgacttcttgcagtgggc

SEQ ID NO: 3353 - DNA, 20 bp, Homo sapiens
ccgacttcttgcagtgggcg

SEQ ID NO: 3354 - DNA, 20 bp, Homo sapiens
cgacttcttgcagtgggcgg

SEQ ID NO: 3355 - DNA, 20 bp, Homo sapiens
gacttcttgcagtgggcgga

SEQ ID NO: 3356 - DNA, 20 bp, Homo sapiens
acttcttgcagtgggcggag

SEQ ID NO: 3357 - DNA, 20 bp, Homo sapiens
cttcttgcagtgggcggagc

SEQ ID NO: 3358 - DNA, 20 bp, Homo sapiens
ttcttgcagtgggcggagcc

SEQ ID NO: 3359 - DNA, 20 bp, Homo sapiens
tcttgcagtgggcggagccc

SEQ ID NO: 3360 - DNA, 20 bp, Homo sapiens
cttgcagtgggcggagccca

SEQ ID NO: 3361 - DNA, 20 bp, Homo sapiens
ttgcagtgggcggagcccat

SEQ ID NO: 3362 - DNA, 20 bp, Homo sapiens
tgcagtgggcggagcccatc

SEQ ID NO: 3363 - DNA, 20 bp, Homo sapiens
gcagtgggcggagcccatcg

SEQ ID NO: 3364 - DNA, 20 bp, Homo sapiens
cagtgggcggagcccatcgt

SEQ ID NO: 3365 - DNA, 20 bp, Homo sapiens
agtgggcggagcccatcgtg

SEQ ID NO: 3366 - DNA, 20 bp, Homo sapiens
gtgggcggagcccatcgtgg

SEQ ID NO: 3367 - DNA, 20 bp, Homo sapiens
tgggcggagcccatcgtggt

SEQ ID NO: 3368 - DNA, 20 bp, Homo sapiens
gggcggagcccatcgtggtg

SEQ ID NO: 3369 - DNA, 20 bp, Homo sapiens
ggcggagcccatcgtggtga

SEQ ID NO: 3370 - DNA, 20 bp, Homo sapiens
gcggagcccatcgtggtgag

SEQ ID NO: 3371 - DNA, 20 bp, Homo sapiens
cggagcccatcgtggtgagg

SEQ ID NO: 3372 - DNA, 20 bp, Homo sapiens
ggagcccatcgtggtgaggc

SEQ ID NO: 3373 - DNA, 20 bp, Homo sapiens
gagcccatcgtggtgaggct

SEQ ID NO: 3374 - DNA, 20 bp, Homo sapiens
agcccatcgtggtgaggctt

SEQ ID NO: 3375 - DNA, 20 bp, Homo sapiens
gcccatcgtggtgaggctta

SEQ ID NO: 3376 - DNA, 20 bp, Homo sapiens
cccatcgtggtgaggcttaa

SEQ ID NO: 3377 - DNA, 20 bp, Homo sapiens
ccatcgtggtgaggcttaag

SEQ ID NO: 3378 - DNA, 20 bp, Homo sapiens
catcgtggtgaggcttaagg

SEQ ID NO: 3379 - DNA, 20 bp, Homo sapiens
atcgtggtgaggcttaagga

SEQ ID NO: 3380 - DNA, 20 bp, Homo sapiens
tcgtggtgaggcttaaggag

SEQ ID NO: 3381 - DNA, 20 bp, Homo sapiens
cgtggtgaggcttaaggagg

SEQ ID NO: 3382 - DNA, 20 bp, Homo sapiens
gtggtgaggcttaaggaggt

SEQ ID NO: 3383 - DNA, 20 bp, Homo sapiens
tggtgaggcttaaggaggtc

SEQ ID NO: 3384 - DNA, 20 bp, Homo sapiens
ggtgaggcttaaggaggtcc

SEQ ID NO: 3385 - DNA, 20 bp, Homo sapiens
gtgaggcttaaggaggtccg

SEQ ID NO: 3386 - DNA, 20 bp, Homo sapiens
tgaggcttaaggaggtccga

SEQ ID NO: 3387 - DNA, 20 bp, Homo sapiens
gaggcttaaggaggtccgac

SEQ ID NO: 3388 - DNA, 20 bp, Homo sapiens
ggcttaaggaggtccgactg

SEQ ID NO: 3389 - DNA, 20 bp, Homo sapiens
gcttaaggaggtccgactgc

SEQ ID NO: 3390 - DNA, 20 bp, Homo sapiens
cttaaggaggtccgactgca

SEQ ID NO: 3391 - DNA, 20 bp, Homo sapiens
cgacttcgagattctgaagg

SEQ ID NO: 3392 - DNA, 20 bp, Homo sapiens
gacttcgagattctgaaggt

SEQ ID NO: 3393 - DNA, 20 bp, Homo sapiens
cttcgagattctgaaggtga

SEQ ID NO: 3394 - DNA, 20 bp, Homo sapiens
ttcgagattctgaaggtgat

SEQ ID NO: 3395 - DNA, 20 bp, Homo sapiens
tcgagattctgaaggtgatc

SEQ ID NO: 3396 - DNA, 20 bp, Homo sapiens
gagattctgaaggtgatcgg

SEQ ID NO: 3397 - DNA, 20 bp, Homo sapiens
agattctgaaggtgatcgga

SEQ ID NO: 3398 - DNA, 20 bp, Homo sapiens
gattctgaaggtgatcggac

SEQ ID NO: 3399 - DNA, 20 bp, Homo sapiens
attctgaaggtgatcggacg

SEQ ID NO: 3400 - DNA, 20 bp, Homo sapiens
gtgaagatgaagcagacggg

SEQ ID NO: 3401 - DNA, 20 bp, Homo sapiens
tgaagatgaagcagacgggc

SEQ ID NO: 3402 - DNA, 20 bp, Homo sapiens
gaagatgaagcagacgggcc

SEQ ID NO: 3403 - DNA, 20 bp, Homo sapiens
aagatgaagcagacgggcca

SEQ ID NO: 3404 - DNA, 20 bp, Homo sapiens
agatgaagcagacgggccag

SEQ ID NO: 3405 - DNA, 20 bp, Homo sapiens
gatgaagcagacgggccagg

SEQ ID NO: 3406 - DNA, 20 bp, Homo sapiens
atgaagcagacgggccaggt

SEQ ID NO: 3407 - DNA, 20 bp, Homo sapiens
tgaagcagacgggccaggtg

SEQ ID NO: 3408 - DNA, 20 bp, Homo sapiens
gaagcagacgggccaggtgt

SEQ ID NO: 3409 - DNA, 20 bp, Homo sapiens
aagcagacgggccaggtgta

SEQ ID NO: 3410 - DNA, 20 bp, Homo sapiens
gccatgaagatcatgaacaa

SEQ ID NO: 3411 - DNA, 20 bp, Homo sapiens
catgaagatcatgaacaagt

SEQ ID NO: 3412 - DNA, 20 bp, Homo sapiens
atgaagatcatgaacaagtg

SEQ ID NO: 3413 - DNA, 20 bp, Homo sapiens
tgaagatcatgaacaagtgg

SEQ ID NO: 3414 - DNA, 20 bp, Homo sapiens
gaagatcatgaacaagtggg

SEQ ID NO: 3415 - DNA, 20 bp, Homo sapiens
aagatcatgaacaagtggga

SEQ ID NO: 3416 - DNA, 20 bp, Homo sapiens
agatcatgaacaagtgggac

SEQ ID NO: 3417 - DNA, 20 bp, Homo sapiens
gatcatgaacaagtgggaca

SEQ ID NO: 3418 - DNA, 20 bp, Homo sapiens
atcatgaacaagtgggacat

SEQ ID NO: 3419 - DNA, 20 bp, Homo sapiens
tcatgaacaagtgggacatg

SEQ ID NO: 3420 - DNA, 20 bp, Homo sapiens
catgaacaagtgggacatgc

SEQ ID NO: 3421 - DNA, 20 bp, Homo sapiens
atgaacaagtgggacatgct

SEQ ID NO: 3422 - DNA, 20 bp, Homo sapiens
tgaacaagtgggacatgctg

SEQ ID NO: 3423 - DNA, 20 bp, Homo sapiens
gaacaagtgggacatgctga

SEQ ID NO: 3424 - DNA, 20 bp, Homo sapiens
aacaagtgggacatgctgaa

SEQ ID NO: 3425 - DNA, 20 bp, Homo sapiens
acaagtgggacatgctgaag

SEQ ID NO: 3426 - DNA, 20 bp, Homo sapiens
caagtgggacatgctgaaga

SEQ ID NO: 3427 - DNA, 20 bp, Homo sapiens
agtgggacatgctgaagagg

SEQ ID NO: 3428 - DNA, 20 bp, Homo sapiens
gtgggacatgctgaagaggg

SEQ ID NO: 3429 - DNA, 20 bp, Homo sapiens
tgggacatgctgaagagggg

SEQ ID NO: 3430 - DNA, 20 bp, Homo sapiens
gggacatgctgaagaggggc

SEQ ID NO: 3431 - DNA, 20 bp, Homo sapiens
ggacatgctgaagaggggcg

SEQ ID NO: 3432 - DNA, 20 bp, Homo sapiens
gacatgctgaagaggggcga

SEQ ID NO: 3433 - DNA, 20 bp, Homo sapiens
acatgctgaagaggggcgag

SEQ ID NO: 3434 - DNA, 20 bp, Homo sapiens
catgctgaagaggggcgagg

SEQ ID NO: 3435 - DNA, 20 bp, Homo sapiens
atgctgaagaggggcgaggt

SEQ ID NO: 3436 - DNA, 20 bp, Homo sapiens
tgctgaagaggggcgaggtg

SEQ ID NO: 3437 - DNA, 20 bp, Homo sapiens
gctgaagaggggcgaggtgt

SEQ ID NO: 3438 - DNA, 20 bp, Homo sapiens
ctgaagaggggcgaggtgtc

SEQ ID NO: 3439 - DNA, 20 bp, Homo sapiens
tgtggccacatccgcctggc

SEQ ID NO: 3440 - DNA, 20 bp, Homo sapiens
ggcagatggaacggtgcggt

SEQ ID NO: 3441 - DNA, 20 bp, Homo sapiens
gcagatggaacggtgcggtc

SEQ ID NO: 3442 - DNA, 20 bp, Homo sapiens
cccgagatcctgcaggctgt

SEQ ID NO: 3443 - DNA, 20 bp, Homo sapiens
ccgagatcctgcaggctgtg

SEQ ID NO: 3444 - DNA, 20 bp, Homo sapiens
cgagatcctgcaggctgtgg

SEQ ID NO: 3445 - DNA, 20 bp, Homo sapiens
gagatcctgcaggctgtggg

SEQ ID NO: 3446 - DNA, 20 bp, Homo sapiens
agatcctgcaggctgtgggc

SEQ ID NO: 3447 - DNA, 20 bp, Homo sapiens
gatcctgcaggctgtgggcg

SEQ ID NO: 3448 - DNA, 20 bp, Homo sapiens
atcctgcaggctgtgggcgg

SEQ ID NO: 3449 - DNA, 20 bp, Homo sapiens
tcctgcaggctgtgggcggt

SEQ ID NO: 3450 - DNA, 20 bp, Homo sapiens
cctgcaggctgtgggcggtg

SEQ ID NO: 3451 - DNA, 20 bp, Homo sapiens
ctgcaggctgtgggcggtgg

SEQ ID NO: 3452 - DNA, 20 bp, Homo sapiens
tgcaggctgtgggcggtggg

SEQ ID NO: 3453 - DNA, 20 bp, Homo sapiens
gcaggctgtgggcggtgggc

SEQ ID NO: 3454 - DNA, 20 bp, Homo sapiens
caggctgtgggcggtgggcc

SEQ ID NO: 3455 - DNA, 20 bp, Homo sapiens
aggctgtgggcggtgggcct

SEQ ID NO: 3456 - DNA, 20 bp, Homo sapiens
ggctgtgggcggtgggcctg

SEQ ID NO: 3457 - DNA, 20 bp, Homo sapiens
gctgtgggcggtgggcctgg

SEQ ID NO: 3458 - DNA, 20 bp, Homo sapiens
ctgtgggcggtgggcctggg

SEQ ID NO: 3459 - DNA, 20 bp, Homo sapiens
tgtgggcggtgggcctggga

SEQ ID NO: 3460 - DNA, 20 bp, Homo sapiens
gtgggcggtgggcctgggac

SEQ ID NO: 3461 - DNA, 20 bp, Homo sapiens
tgggcggtgggcctgggaca

SEQ ID NO: 3462 - DNA, 20 bp, Homo sapiens
gggcggtgggcctgggacag

SEQ ID NO: 3463 - DNA, 20 bp, Homo sapiens
ggcggtgggcctgggacagg

SEQ ID NO: 3464 - DNA, 20 bp, Homo sapiens
gcggtgggcctgggacaggc

SEQ ID NO: 3465 - DNA, 20 bp, Homo sapiens
cggtgggcctgggacaggca

SEQ ID NO: 3466 - DNA, 20 bp, Homo sapiens
ggtgggcctgggacaggcag

SEQ ID NO: 3467 - DNA, 20 bp, Homo sapiens
gtgggcctgggacaggcagc

SEQ ID NO: 3468 - DNA, 20 bp, Homo sapiens
tgggcctgggacaggcagct

SEQ ID NO: 3469 - DNA, 20 bp, Homo sapiens
gggcctgggacaggcagcta

SEQ ID NO: 3470 - DNA, 20 bp, Homo sapiens
ggcctgggacaggcagctac

SEQ ID NO: 3471 - DNA, 20 bp, Homo sapiens
gcctgggacaggcagctacg

SEQ ID NO: 3472 - DNA, 20 bp, Homo sapiens
cctgggacaggcagctacgg

SEQ ID NO: 3473 - DNA, 20 bp, Homo sapiens
ctgggacaggcagctacggg

SEQ ID NO: 3474 - DNA, 20 bp, Homo sapiens
tgggacaggcagctacgggc

SEQ ID NO: 3475 - DNA, 20 bp, Homo sapiens
gggacaggcagctacgggcc

SEQ ID NO: 3476 - DNA, 20 bp, Homo sapiens
ttcgcctatgaaatgttcta

SEQ ID NO: 3477 - DNA, 20 bp, Homo sapiens
cgcggattccacggcggaga

SEQ ID NO: 3478 - DNA, 20 bp, Homo sapiens
gcggattccacggcggagac

SEQ ID NO: 3479 - DNA, 20 bp, Homo sapiens
cggattccacggcggagacc

SEQ ID NO: 3480 - DNA, 20 bp, Homo sapiens
ggattccacggcggagacct

SEQ ID NO: 3481 - DNA, 20 bp, Homo sapiens
gattccacggcggagaccta

SEQ ID NO: 3482 - DNA, 20 bp, Homo sapiens
ggcaagatcgtccactacaa

SEQ ID NO: 3483 - DNA, 20 bp, Homo sapiens
gcaagatcgtccactacaag

SEQ ID NO: 3484 - DNA, 20 bp, Homo sapiens
caagatcgtccactacaagg

SEQ ID NO: 3485 - DNA, 20 bp, Homo sapiens
aagatcgtccactacaagga

SEQ ID NO: 3486 - DNA, 20 bp, Homo sapiens
agatcgtccactacaaggag

SEQ ID NO: 3487 - DNA, 20 bp, Homo sapiens
gatcgtccactacaaggagc

SEQ ID NO: 3488 - DNA, 20 bp, Homo sapiens
atcgtccactacaaggagca

SEQ ID NO: 3489 - DNA, 20 bp, Homo sapiens
tcgtccactacaaggagcac

SEQ ID NO: 3490 - DNA, 20 bp, Homo sapiens
cgtccactacaaggagcacc

SEQ ID NO: 3491 - DNA, 20 bp, Homo sapiens
gtccactacaaggagcacct

SEQ ID NO: 3492 - DNA, 20 bp, Homo sapiens
tccactacaaggagcacctc

SEQ ID NO: 3493 - DNA, 20 bp, Homo sapiens
ccactacaaggagcacctct

SEQ ID NO: 3494 - DNA, 20 bp, Homo sapiens
cactacaaggagcacctctc

SEQ ID NO: 3495 - DNA, 20 bp, Homo sapiens
actacaaggagcacctctct

SEQ ID NO: 3496 - DNA, 20 bp, Homo sapiens
ctacaaggagcacctctctc

SEQ ID NO: 3497 - DNA, 20 bp, Homo sapiens
tacaaggagcacctctctct

SEQ ID NO: 3498 - DNA, 20 bp, Homo sapiens
acaaggagcacctctctctg

SEQ ID NO: 3499 - DNA, 20 bp, Homo sapiens
aaggagcacctctctctgcc

SEQ ID NO: 3500 - DNA, 20 bp, Homo sapiens
aggagcacctctctctgccg

SEQ ID NO: 3501 - DNA, 20 bp, Homo sapiens
ggagcacctctctctgccgc

SEQ ID NO: 3502 - DNA, 20 bp, Homo sapiens
gagcacctctctctgccgct

SEQ ID NO: 3503 - DNA, 20 bp, Homo sapiens
agcacctctctctgccgctg

SEQ ID NO: 3504 - DNA, 20 bp, Homo sapiens
gcacctctctctgccgctgg

SEQ ID NO: 3505 - DNA, 20 bp, Homo sapiens
cccggagacacggctgggcc

SEQ ID NO: 3506 - DNA, 20 bp, Homo sapiens
ccggagacacggctgggccg

SEQ ID NO: 3507 - DNA, 20 bp, Homo sapiens
cggagacacggctgggccgg

SEQ ID NO: 3508 - DNA, 20 bp, Homo sapiens
ggagacacggctgggccggg

SEQ ID NO: 3509 - DNA, 20 bp, Homo sapiens
gagacacggctgggccgggg

SEQ ID NO: 3510 - DNA, 20 bp, Homo sapiens
agacacggctgggccggggt

SEQ ID NO: 3511 - DNA, 20 bp, Homo sapiens
gacacggctgggccggggtg

SEQ ID NO: 3512 - DNA, 20 bp, Homo sapiens
acacggctgggccggggtgg

SEQ ID NO: 3513 - DNA, 20 bp, Homo sapiens
cacggctgggccggggtgga

SEQ ID NO: 3514 - DNA, 20 bp, Homo sapiens
acggctgggccggggtggag

SEQ ID NO: 3515 - DNA, 20 bp, Homo sapiens
cggctgggccggggtggagc

SEQ ID NO: 3516 - DNA, 20 bp, Homo sapiens
ggctgggccggggtggagca

SEQ ID NO: 3517 - DNA, 20 bp, Homo sapiens
gctgggccggggtggagcag

SEQ ID NO: 3518 - DNA, 20 bp, Homo sapiens
gacttccggacacatccctt

SEQ ID NO: 3519 - DNA, 20 bp, Homo sapiens
acttccggacacatcccttc

SEQ ID NO: 3520 - DNA, 20 bp, Homo sapiens
cttccggacacatcccttct

SEQ ID NO: 3521 - DNA, 20 bp, Homo sapiens
ttccggacacatcccttctt

SEQ ID NO: 3522 - DNA, 20 bp, Homo sapiens
tccggacacatcccttcttc

SEQ ID NO: 3523 - DNA, 20 bp, Homo sapiens
ccggacacatcccttcttct

SEQ ID NO: 3524 - DNA, 20 bp, Homo sapiens
cggacacatcccttcttctt

SEQ ID NO: 3525 - DNA, 20 bp, Homo sapiens
ggacacatcccttcttcttt

SEQ ID NO: 3526 - DNA, 20 bp, Homo sapiens
gacacatcccttcttctttg

SEQ ID NO: 3527 - DNA, 20 bp, Homo sapiens
acacatcccttcttctttgg

SEQ ID NO: 3528 - DNA, 20 bp, Homo sapiens
acatcccttcttctttggcc

SEQ ID NO: 3529 - DNA, 20 bp, Homo sapiens
catcccttcttctttggcct

SEQ ID NO: 3530 - DNA, 20 bp, Homo sapiens
atcccttcttctttggcctc

SEQ ID NO: 3531 - DNA, 20 bp, Homo sapiens
tcccttcttctttggcctcg

SEQ ID NO: 3532 - DNA, 20 bp, Homo sapiens
cccttcttctttggcctcga

SEQ ID NO: 3533 - DNA, 20 bp, Homo sapiens
ccttcttctttggcctcgac

SEQ ID NO: 3534 - DNA, 20 bp, Homo sapiens
cttcttctttggcctcgact

SEQ ID NO: 3535 - DNA, 20 bp, Homo sapiens
ttcttctttggcctcgactg

SEQ ID NO: 3536 - DNA, 20 bp, Homo sapiens
tcttctttggcctcgactgg

SEQ ID NO: 3537 - DNA, 20 bp, Homo sapiens
cttctttggcctcgactggg

SEQ ID NO: 3538 - DNA, 20 bp, Homo sapiens
ttctttggcctcgactggga

SEQ ID NO: 3539 - DNA, 20 bp, Homo sapiens
tctttggcctcgactgggat

SEQ ID NO: 3540 - DNA, 20 bp, Homo sapiens
ctttggcctcgactgggatg

SEQ ID NO: 3541 - DNA, 20 bp, Homo sapiens
tttggcctcgactgggatgg

SEQ ID NO: 3542 - DNA, 20 bp, Homo sapiens
ttggcctcgactgggatggt

SEQ ID NO: 3543 - DNA, 20 bp, Homo sapiens
tggcctcgactgggatggtc

SEQ ID NO: 3544 - DNA, 20 bp, Homo sapiens
ggcctcgactgggatggtct

SEQ ID NO: 3545 - DNA, 20 bp, Homo sapiens
gcctcgactgggatggtctc

SEQ ID NO: 3546 - DNA, 20 bp, Homo sapiens
cctcgactgggatggtctcc

SEQ ID NO: 3547 - DNA, 20 bp, Homo sapiens
cctttacaccggatttcgaa

SEQ ID NO: 3548 - DNA, 20 bp, Homo sapiens
ctttacaccggatttcgaag

SEQ ID NO: 3549 - DNA, 20 bp, Homo sapiens
tttacaccggatttcgaagg

SEQ ID NO: 3550 - DNA, 20 bp, Homo sapiens
ttacaccggatttcgaaggt

SEQ ID NO: 3551 - DNA, 20 bp, Homo sapiens
tacaccggatttcgaaggtg

SEQ ID NO: 3552 - DNA, 20 bp, Homo sapiens
acaccggatttcgaaggtgc

SEQ ID NO: 3553 - DNA, 20 bp, Homo sapiens
caccggatttcgaaggtgcc

SEQ ID NO: 3554 - DNA, 20 bp, Homo sapiens
accggatttcgaaggtgcca

SEQ ID NO: 3555 - DNA, 20 bp, Homo sapiens
ccggatttcgaaggtgccac

SEQ ID NO: 3556 - DNA, 20 bp, Homo sapiens
cggatttcgaaggtgccacc

SEQ ID NO: 3557 - DNA, 20 bp, Homo sapiens
ggatttcgaaggtgccaccg

SEQ ID NO: 3558 - DNA, 20 bp, Homo sapiens
gatttcgaaggtgccaccga

SEQ ID NO: 3559 - DNA, 20 bp, Homo sapiens
atttcgaaggtgccaccgac

SEQ ID NO: 3560 - DNA, 20 bp, Homo sapiens
tttcgaaggtgccaccgaca

SEQ ID NO: 3561 - DNA, 20 bp, Homo sapiens
ttcgaaggtgccaccgacac

SEQ ID NO: 3562 - DNA, 20 bp, Homo sapiens
tcgaaggtgccaccgacaca

SEQ ID NO: 3563 - DNA, 20 bp, Homo sapiens
cgaaggtgccaccgacacat

SEQ ID NO: 3564 - DNA, 20 bp, Homo sapiens
gaaggtgccaccgacacatg

SEQ ID NO: 3565 - DNA, 20 bp, Homo sapiens
aaggtgccaccgacacatgc

SEQ ID NO: 3566 - DNA, 20 bp, Homo sapiens
aggtgccaccgacacatgca

SEQ ID NO: 3567 - DNA, 20 bp, Homo sapiens
ggtgccaccgacacatgcaa

SEQ ID NO: 3568 - DNA, 20 bp, Homo sapiens
gtgccaccgacacatgcaac

SEQ ID NO: 3569 - DNA, 20 bp, Homo sapiens
tgccaccgacacatgcaact

SEQ ID NO: 3570 - DNA, 20 bp, Homo sapiens
gccaccgacacatgcaactt

SEQ ID NO: 3571 - DNA, 20 bp, Homo sapiens
ccaccgacacatgcaacttc

SEQ ID NO: 3572 - DNA, 20 bp, Homo sapiens
caccgacacatgcaacttcg

SEQ ID NO: 3573 - DNA, 20 bp, Homo sapiens
ccgacacatgcaacttcgac

SEQ ID NO: 3574 - DNA, 20 bp, Homo sapiens
cgacacatgcaacttcgact

SEQ ID NO: 3575 - DNA, 20 bp, Homo sapiens
gacacatgcaacttcgactt

SEQ ID NO: 3576 - DNA, 20 bp, Homo sapiens
acacatgcaacttcgacttg

SEQ ID NO: 3577 - DNA, 20 bp, Homo sapiens
cacatgcaacttcgacttgg

SEQ ID NO: 3578 - DNA, 20 bp, Homo sapiens
acatgcaacttcgacttggt

SEQ ID NO: 3579 - DNA, 20 bp, Homo sapiens
catgcaacttcgacttggtg

SEQ ID NO: 3580 - DNA, 20 bp, Homo sapiens
atgcaacttcgacttggtgg

SEQ ID NO: 3581 - DNA, 20 bp, Homo sapiens
tgcaacttcgacttggtgga

SEQ ID NO: 3582 - DNA, 20 bp, Homo sapiens
gcaacttcgacttggtggag

SEQ ID NO: 3583 - DNA, 20 bp, Homo sapiens
caacttcgacttggtggagg

SEQ ID NO: 3584 - DNA, 20 bp, Homo sapiens
aacttcgacttggtggagga

SEQ ID NO: 3585 - DNA, 20 bp, Homo sapiens
acttcgacttggtggaggac

SEQ ID NO: 3586 - DNA, 20 bp, Homo sapiens
cttcgacttggtggaggacg

SEQ ID NO: 3587 - DNA, 20 bp, Homo sapiens
ttcgacttggtggaggacgg

SEQ ID NO: 3588 - DNA, 20 bp, Homo sapiens
tcgacttggtggaggacggg

SEQ ID NO: 3589 - DNA, 20 bp, Homo sapiens
cgacttggtggaggacgggc

SEQ ID NO: 3590 - DNA, 20 bp, Homo sapiens
gacttggtggaggacgggct

SEQ ID NO: 3591 - DNA, 20 bp, Homo sapiens
acttggtggaggacgggctc

SEQ ID NO: 3592 - DNA, 20 bp, Homo sapiens
cttggtggaggacgggctca

SEQ ID NO: 3593 - DNA, 20 bp, Homo sapiens
cgaggcagaggctcggaacc

SEQ ID NO: 3594 - DNA, 20 bp, Homo sapiens
gaggcagaggctcggaaccg

SEQ ID NO: 3595 - DNA, 20 bp, Homo sapiens
aggcagaggctcggaaccgg

SEQ ID NO: 3596 - DNA, 20 bp, Homo sapiens
ggcagaggctcggaaccggg

SEQ ID NO: 3597 - DNA, 20 bp, Homo sapiens
gcagaggctcggaaccggga

SEQ ID NO: 3598 - DNA, 20 bp, Homo sapiens
cagaggctcggaaccgggac

SEQ ID NO: 3599 - DNA, 20 bp, Homo sapiens
gaggctcggaaccgggacct

SEQ ID NO: 3600 - DNA, 20 bp, Homo sapiens
aggctcggaaccgggaccta

SEQ ID NO: 3601 - DNA, 20 bp, Homo sapiens
ggctcggaaccgggacctag

SEQ ID NO: 3602 - DNA, 20 bp, Homo sapiens
gctcggaaccgggacctaga

SEQ ID NO: 3603 - DNA, 20 bp, Homo sapiens
ctcggaaccgggacctagag

SEQ ID NO: 3604 - DNA, 20 bp, Homo sapiens
tcggaaccgggacctagagg

SEQ ID NO: 3605 - DNA, 20 bp, Homo sapiens
cggaaccgggacctagaggc

SEQ ID NO: 3606 - DNA, 20 bp, Homo sapiens
ggcagttgcaggagcggatg

SEQ ID NO: 3607 - DNA, 20 bp, Homo sapiens
gcagttgcaggagcggatgg

SEQ ID NO: 3608 - DNA, 20 bp, Homo sapiens
cagttgcaggagcggatgga

SEQ ID NO: 3609 - DNA, 20 bp, Homo sapiens
agttgcaggagcggatggag

SEQ ID NO: 3610 - DNA, 20 bp, Homo sapiens
gttgcaggagcggatggagt

SEQ ID NO: 3611 - DNA, 20 bp, Homo sapiens
ttgcaggagcggatggagtt

SEQ ID NO: 3612 - DNA, 20 bp, Homo sapiens
tgcaggagcggatggagttg

SEQ ID NO: 3613 - DNA, 20 bp, Homo sapiens
caggagcggatggagttgct

SEQ ID NO: 3614 - DNA, 20 bp, Homo sapiens
aggagcggatggagttgctg

SEQ ID NO: 3615 - DNA, 20 bp, Homo sapiens
ggagcggatggagttgctgc

SEQ ID NO: 3616 - DNA, 20 bp, Homo sapiens
ggcagagggagccacagctg

SEQ ID NO: 3617 - DNA, 20 bp, Homo sapiens
gcagagggagccacagctgt

SEQ ID NO: 3618 - DNA, 20 bp, Homo sapiens
cagagggagccacagctgtc

SEQ ID NO: 3619 - DNA, 20 bp, Homo sapiens
agagggagccacagctgtca

SEQ ID NO: 3620 - DNA, 20 bp, Homo sapiens
gagggagccacagctgtcac

SEQ ID NO: 3621 - DNA, 20 bp, Homo sapiens
agggagccacagctgtcacg

SEQ ID NO: 3622 - DNA, 20 bp, Homo sapiens
gggagccacagctgtcacgg

SEQ ID NO: 3623 - DNA, 20 bp, Homo sapiens
ggagccacagctgtcacggg

SEQ ID NO: 3624 - DNA, 20 bp, Homo sapiens
gagccacagctgtcacgggg

SEQ ID NO: 3625 - DNA, 20 bp, Homo sapiens
agccacagctgtcacggggg

SEQ ID NO: 3626 - DNA, 20 bp, Homo sapiens
gccacagctgtcacgggggt

SEQ ID NO: 3627 - DNA, 20 bp, Homo sapiens
ccacagctgtcacgggggtc

SEQ ID NO: 3628 - DNA, 20 bp, Homo sapiens
cacagctgtcacgggggtcc

SEQ ID NO: 3629 - DNA, 20 bp, Homo sapiens
acagctgtcacgggggtccc

SEQ ID NO: 3630 - DNA, 20 bp, Homo sapiens
cgggccacggatccaccttc

SEQ ID NO: 3631 - DNA, 20 bp, Homo sapiens
gggccacggatccaccttcc

SEQ ID NO: 3632 - DNA, 20 bp, Homo sapiens
ggccacggatccaccttccc

SEQ ID NO: 3633 - DNA, 20 bp, Homo sapiens
gccacggatccaccttccca

SEQ ID NO: 3634 - DNA, 20 bp, Homo sapiens
ccacggatccaccttcccat

SEQ ID NO: 3635 - DNA, 20 bp, Homo sapiens
cacggatccaccttcccatc

SEQ ID NO: 3636 - DNA, 20 bp, Homo sapiens
cggatccaccttcccatcta

SEQ ID NO: 3637 - DNA, 20 bp, Homo sapiens
ggatccaccttcccatctag

SEQ ID NO: 3638 - DNA, 20 bp, Homo sapiens
gatccaccttcccatctaga

SEQ ID NO: 3639 - DNA, 20 bp, Homo sapiens
atccaccttcccatctagat

SEQ ID NO: 3640 - DNA, 20 bp, Homo sapiens
ccaccttcccatctagatgg

SEQ ID NO: 3641 - DNA, 20 bp, Homo sapiens
caccttcccatctagatggc

SEQ ID NO: 3642 - DNA, 20 bp, Homo sapiens
accttcccatctagatggcc

SEQ ID NO: 3643 - DNA, 20 bp, Homo sapiens
tgggccagtgcccgctggtg

SEQ ID NO: 3644 - DNA, 20 bp, Homo sapiens
gggccagtgcccgctggtgg

SEQ ID NO: 3645 - DNA, 20 bp, Homo sapiens
ggccagtgcccgctggtggg

SEQ ID NO: 3646 - DNA, 20 bp, Homo sapiens
gccagtgcccgctggtgggg

SEQ ID NO: 3647 - DNA, 20 bp, Homo sapiens
cagtgcccgctggtggggcc

SEQ ID NO: 3648 - DNA, 20 bp, Homo sapiens
agtgcccgctggtggggcca

SEQ ID NO: 3649 - DNA, 20 bp, Homo sapiens
gtgcccgctggtggggccag

SEQ ID NO: 3650 - DNA, 20 bp, Homo sapiens
tgcccgctggtggggccagg

SEQ ID NO: 3651 - DNA, 20 bp, Homo sapiens
gcccgctggtggggccaggc

SEQ ID NO: 3652 - DNA, 20 bp, Homo sapiens
ccgctggtggggccaggccc

SEQ ID NO: 3653 - DNA, 20 bp, Homo sapiens
cccatgcaccgccgccacct

SEQ ID NO: 3654 - DNA, 20 bp, Homo sapiens
ccatgcaccgccgccacctg

SEQ ID NO: 3655 - DNA, 20 bp, Homo sapiens
catgcaccgccgccacctgc

SEQ ID NO: 3656 - DNA, 20 bp, Homo sapiens
atgcaccgccgccacctgct

SEQ ID NO: 3657 - DNA, 20 bp, Homo sapiens
tgcaccgccgccacctgctg

SEQ ID NO: 3658 - DNA, 20 bp, Homo sapiens
gcaccgccgccacctgctgc

SEQ ID NO: 3659 - DNA, 20 bp, Homo sapiens
caccgccgccacctgctgct

SEQ ID NO: 3660 - DNA, 20 bp, Homo sapiens
accgccgccacctgctgctc

SEQ ID NO: 3661 - DNA, 20 bp, Homo sapiens
ccgccgccacctgctgctcc

SEQ ID NO: 3662 - DNA, 20 bp, Homo sapiens
cgccgccacctgctgctccc

SEQ ID NO: 3663 - DNA, 20 bp, Homo sapiens
gccgccacctgctgctccct

SEQ ID NO: 3664 - DNA, 20 bp, Homo sapiens
ccgccacctgctgctccctg

SEQ ID NO: 3665 - DNA, 20 bp, Homo sapiens
cgccacctgctgctccctgc

SEQ ID NO: 3666 - DNA, 20 bp, Homo sapiens
gccacctgctgctccctgcc

SEQ ID NO: 3667 - DNA, 20 bp, Homo sapiens
ccacctgctgctccctgcca

SEQ ID NO: 3668 - DNA, 20 bp, Homo sapiens
cacctgctgctccctgccag

SEQ ID NO: 3669 - DNA, 20 bp, Homo sapiens
cctgctgctccctgccaggg

SEQ ID NO: 3670 - DNA, 20 bp, Homo sapiens
ctgctgctccctgccagggt

SEQ ID NO: 3671 - DNA, 20 bp, Homo sapiens
tgctgctccctgccagggtc

SEQ ID NO: 3672 - DNA, 20 bp, Homo sapiens
gctgctccctgccagggtcc

SEQ ID NO: 3673 - DNA, 20 bp, Homo sapiens
cctgccagggtccctaggcc

SEQ ID NO: 3674 - DNA, 20 bp, Homo sapiens
ctgccagggtccctaggcct

SEQ ID NO: 3675 - DNA, 20 bp, Homo sapiens
gccagggtccctaggcctgg

SEQ ID NO: 3676 - DNA, 20 bp, Homo sapiens
ccagggtccctaggcctggc

SEQ ID NO: 3677 - DNA, 20 bp, Homo sapiens
cagggtccctaggcctggcc

SEQ ID NO: 3678 - DNA, 20 bp, Homo sapiens
agggtccctaggcctggcct

SEQ ID NO: 3679 - DNA, 20 bp, Homo sapiens
gggtccctaggcctggccta

SEQ ID NO: 3680 - DNA, 20 bp, Homo sapiens
ggtccctaggcctggcctat

SEQ ID NO: 3681 - DNA, 20 bp, Homo sapiens
gtccctaggcctggcctatc

SEQ ID NO: 3682 - DNA, 20 bp, Homo sapiens
tccctaggcctggcctatcg

SEQ ID NO: 3683 - DNA, 20 bp, Homo sapiens
ccctaggcctggcctatcgg

SEQ ID NO: 3684 - DNA, 20 bp, Homo sapiens
cctaggcctggcctatcgga

SEQ ID NO: 3685 - DNA, 20 bp, Homo sapiens
ctaggcctggcctatcggag

SEQ ID NO: 3686 - DNA, 20 bp, Homo sapiens
taggcctggcctatcggagg

SEQ ID NO: 3687 - DNA, 20 bp, Homo sapiens
aggcctggcctatcggaggc

SEQ ID NO: 3688 - DNA, 20 bp, Homo sapiens
gcctggcctatcggaggcgc

SEQ ID NO: 3689 - DNA, 20 bp, Homo sapiens
gcgctttccctgctcctgtt

SEQ ID NO: 3690 - DNA, 20 bp, Homo sapiens
cgctttccctgctcctgttc

SEQ ID NO: 3691 - DNA, 20 bp, Homo sapiens
gctttccctgctcctgttcg

SEQ ID NO: 3692 - DNA, 20 bp, Homo sapiens
ctttccctgctcctgttcgc

SEQ ID NO: 3693 - DNA, 20 bp, Homo sapiens
tttccctgctcctgttcgcc

SEQ ID NO: 3694 - DNA, 20 bp, Homo sapiens
ttccctgctcctgttcgccg

SEQ ID NO: 3695 - DNA, 20 bp, Homo sapiens
tccctgctcctgttcgccgt

SEQ ID NO: 3696 - DNA, 20 bp, Homo sapiens
ccctgctcctgttcgccgtt

SEQ ID NO: 3697 - DNA, 20 bp, Homo sapiens
cctgctcctgttcgccgttg

SEQ ID NO: 3698 - DNA, 20 bp, Homo sapiens
tctgtctcgtgccgccgccc

SEQ ID NO: 3699 - DNA, 20 bp, Homo sapiens
ctgtctcgtgccgccgccct

SEQ ID NO: 3700 - DNA, 20 bp, Homo sapiens
tgtctcgtgccgccgccctg

SEQ ID NO: 3701 - DNA, 20 bp, Homo sapiens
gtctcgtgccgccgccctgg

SEQ ID NO: 3702 - DNA, 20 bp, Homo sapiens
tctcgtgccgccgccctggg

SEQ ID NO: 3703 - DNA, 20 bp, Homo sapiens
ctcgtgccgccgccctgggc

SEQ ID NO: 3704 - DNA, 20 bp, Homo sapiens
tcgtgccgccgccctgggct

SEQ ID NO: 3705 - DNA, 20 bp, Homo sapiens
cgtgccgccgccctgggctg

SEQ ID NO: 3706 - DNA, 20 bp, Homo sapiens
gtgccgccgccctgggctgc

SEQ ID NO: 3707 - DNA, 20 bp, Homo sapiens
cgccggccaactcaccgcag

SEQ ID NO: 3708 - DNA, 20 bp, Homo sapiens
gccggccaactcaccgcagt

SEQ ID NO: 3709 - DNA, 20 bp, Homo sapiens
ccggccaactcaccgcagtc

SEQ ID NO: 3710 - DNA, 20 bp, Homo sapiens
cggccaactcaccgcagtct

SEQ ID NO: 3711 - DNA, 20 bp, Homo sapiens
ggccaactcaccgcagtctg

SEQ ID NO: 3712 - DNA, 20 bp, Homo sapiens
gccaactcaccgcagtctgg

SEQ ID NO: 3713 - DNA, 20 bp, Homo sapiens
ccaactcaccgcagtctggc

SEQ ID NO: 3714 - DNA, 20 bp, Homo sapiens
caactcaccgcagtctggcg

SEQ ID NO: 3715 - DNA, 20 bp, Homo sapiens
ctgaaccctagaactgtctt

SEQ ID NO: 3716 - DNA, 20 bp, Homo sapiens
tgaaccctagaactgtcttc

SEQ ID NO: 3717 - DNA, 20 bp, Homo sapiens
gaaccctagaactgtcttcg

SEQ ID NO: 3718 - DNA, 20 bp, Homo sapiens
aaccctagaactgtcttcga

SEQ ID NO: 3719 - DNA, 20 bp, Homo sapiens
accctagaactgtcttcgac

SEQ ID NO: 3720 - DNA, 20 bp, Homo sapiens
ccctagaactgtcttcgact

SEQ ID NO: 3721 - DNA, 20 bp, Homo sapiens
cctagaactgtcttcgactc

SEQ ID NO: 3722 - DNA, 20 bp, Homo sapiens
ctagaactgtcttcgactcc

SEQ ID NO: 3723 - DNA, 20 bp, Homo sapiens
tagaactgtcttcgactccg

SEQ ID NO: 3724 - DNA, 20 bp, Homo sapiens
agaactgtcttcgactccgg

SEQ ID NO: 3725 - DNA, 20 bp, Homo sapiens
gaactgtcttcgactccggg

SEQ ID NO: 3726 - DNA, 20 bp, Homo sapiens
aactgtcttcgactccgggg

SEQ ID NO: 3727 - DNA, 20 bp, Homo sapiens
actgtcttcgactccggggc

SEQ ID NO: 3728 - DNA, 20 bp, Homo sapiens
ctgtcttcgactccggggcc

SEQ ID NO: 3729 - DNA, 20 bp, Homo sapiens
tgtcttcgactccggggccc

SEQ ID NO: 3730 - DNA, 20 bp, Homo sapiens
agaagccgcgcccaccgcct

SEQ ID NO: 3731 - DNA, 20 bp, Homo sapiens
gaagccgcgcccaccgcctg

SEQ ID NO: 3732 - DNA, 20 bp, Homo sapiens
aagccgcgcccaccgcctgc

SEQ ID NO: 3733 - DNA, 20 bp, Homo sapiens
gccgcgcccaccgcctgcca

SEQ ID NO: 3734 - DNA, 20 bp, Homo sapiens
cgcgcccaccgcctgccagt

SEQ ID NO: 3735 - DNA, 20 bp, Homo sapiens
cgcccaccgcctgccagttc

SEQ ID NO: 3736 - DNA, 20 bp, Homo sapiens
gcccaccgcctgccagttca

SEQ ID NO: 3737 - DNA, 20 bp, Homo sapiens
ccaccgcctgccagttcaca

SEQ ID NO: 3738 - DNA, 20 bp, Homo sapiens
tgggtctccgcccagctcca

SEQ ID NO: 3739 - DNA, 20 bp, Homo sapiens
ggtctccgcccagctccagt

SEQ ID NO: 3740 - DNA, 20 bp, Homo sapiens
gtctccgcccagctccagtc

SEQ ID NO: 3741 - DNA, 20 bp, Homo sapiens
ctccgcccagctccagtcct

SEQ ID NO: 3742 - DNA, 20 bp, Homo sapiens
ccgcccagctccagtcctgt

SEQ ID NO: 3743 - DNA, 20 bp, Homo sapiens
cgcccagctccagtcctgtg

SEQ ID NO: 3744 - DNA, 20 bp, Homo sapiens
gcccagctccagtcctgtga

SEQ ID NO: 3745 - DNA, 20 bp, Homo sapiens
tctttcggccaggctgaggc

SEQ ID NO: 3746 - DNA, 20 bp, Homo sapiens
ctttcggccaggctgaggcc

SEQ ID NO: 3747 - DNA, 20 bp, Homo sapiens
ccgacttcttgcagtggggt

SEQ ID NO: 3748 - DNA, 20 bp, Homo sapiens
agatcctcccatcctggggc

SEQ ID NO: 3749 - DNA, 20 bp, Homo sapiens
caacatttctctgtcctatg

SEQ ID NO: 3750 - DNA, 20 bp, Homo sapiens
ggggcagagtaaggtcagca

SEQ ID NO: 3751 - DNA, 20 bp, Homo sapiens
tgactcagagccatggctta

SEQ ID NO: 3752 - DNA, 20 bp, Homo sapiens
cagcctcccatggcctctct

SEQ ID NO: 3753 - DNA, 20 bp, Homo sapiens
gggcaagccaggagggccag

SEQ ID NO: 3754 - DNA, 20 bp, Homo sapiens
agggccagcatggggcagct

SEQ ID NO: 3755 - DNA, 20 bp, Homo sapiens
atggggcagctgccaggggc

SEQ ID NO: 3756 - DNA, 20 bp, Homo sapiens
gccaggggcgcagccgacag

SEQ ID NO: 3757 - DNA, 20 bp, Homo sapiens
cgacaggcaggtgttcggcg

SEQ ID NO: 3758 - DNA, 20 bp, Homo sapiens
ggtgcccaggcactgggagg

SEQ ID NO: 3759 - DNA, 20 bp, Homo sapiens
ccagctttgcagacaggcgc

SEQ ID NO: 3760 - DNA, 20 bp, Homo sapiens
ccaggagggacaactttggg

SEQ ID NO: 3761 - DNA, 20 bp, Homo sapiens
ctttgggttcttctgggtgt

SEQ ID NO: 3762 - DNA, 20 bp, Homo sapiens
ctatgagccgtgtgggtcag

SEQ ID NO: 3763 - DNA, 20 bp, Homo sapiens
ctttccagggcctggggcca

SEQ ID NO: 3764 - DNA, 20 bp, Homo sapiens
cttctgccagctgccttgtc

SEQ ID NO: 3765 - DNA, 20 bp, Homo sapiens
tcactggtcactggtttctt

SEQ ID NO: 3766 - DNA, 20 bp, Homo sapiens
ctcctcctcccatttcacag

SEQ ID NO: 3767 - DNA, 20 bp, Homo sapiens
cagcctctggaaaaaccttc

SEQ ID NO: 3768 - DNA, 20 bp, Homo sapiens
ccctaatgactctcctggcc

SEQ ID NO: 3769 - DNA, 20 bp, Homo sapiens
gaggagcactccttttgtgg

SEQ ID NO: 3770 - DNA, 20 bp, Homo sapiens
gttcctgctgccttaaaagg

SEQ ID NO: 3771 - DNA, 20 bp, Homo sapiens
tgggaagcagacagtcctag

SEQ ID NO: 3772 - DNA, 20 bp, Homo sapiens
cttagaaattgatgaatgac

SEQ ID NO: 3773 - DNA, 20 bp, Homo sapiens
tctccggctgcagctcctcc

SEQ ID NO: 3774 - DNA, 20 bp, Homo sapiens
gctgcagctcctccgggtgc

SEQ ID NO: 3775 - DNA, 20 bp, Homo sapiens
gtgccctgcaggtgtcgtgc

SEQ ID NO: 3776 - DNA, 20 bp, Homo sapiens
tgagaactacctggtgagct

SEQ ID NO: 3777 - DNA, 20 bp, Homo sapiens
aggaggtggggagaggaagc

SEQ ID NO: 3778 - DNA, 20 bp, Homo sapiens
tctaggattgggggtgctgc

SEQ ID NO: 3779 - DNA, 20 bp, Homo sapiens
gtgtcaggtggatgaggggc

SEQ ID NO: 3780 - DNA, 20 bp, Homo sapiens
ggggggtctcttacctggaa

SEQ ID NO: 3781 - DNA, 20 bp, Homo sapiens
gagtgtctgggacctattct

SEQ ID NO: 3782 - DNA, 20 bp, Homo sapiens
ccagaacatctcagggggag

SEQ ID NO: 3783 - DNA, 20 bp, Homo sapiens
tggttatctctgggctgggg

SEQ ID NO: 3784 - DNA, 20 bp, Homo sapiens
gccatccgtgatggatcagg

SEQ ID NO: 3785 - DNA, 20 bp, Homo sapiens
cagtacctggtcatggagta

SEQ ID NO: 3786 - DNA, 20 bp, Homo sapiens
ggttcttggaaggtcagagc

SEQ ID NO: 3787 - DNA, 20 bp, Homo sapiens
ggtgggaccacagaagggag

SEQ ID NO: 3788 - DNA, 20 bp, Homo sapiens
gcagggacatcaaacccgac

SEQ ID NO: 3789 - DNA, 20 bp, Homo sapiens
gaacggtgagccagtgccct

SEQ ID NO: 3790 - DNA, 20 bp, Homo sapiens
agtggttggaaggagggccc

SEQ ID NO: 3791 - DNA, 20 bp, Homo sapiens
gtgggcccagaggggtgggc

SEQ ID NO: 3792 - DNA, 20 bp, Homo sapiens
ccaagcctcgctctgctcct

SEQ ID NO: 3793 - DNA, 20 bp, Homo sapiens
agatcgtccactacaaggtg

SEQ ID NO: 3794 - DNA, 20 bp, Homo sapiens
ggtgagcgggggcggggtag

SEQ ID NO: 3795 - DNA, 20 bp, Homo sapiens
aggacccagcagtgacctag

SEQ ID NO: 3796 - DNA, 20 bp, Homo sapiens
ggagtggggagctatctgag

SEQ ID NO: 3797 - DNA, 20 bp, Homo sapiens
gtctagagaattagagaatt

SEQ ID NO: 3798 - DNA, 20 bp, Homo sapiens
tcctgcatggccctcaggta

SEQ ID NO: 3799 - DNA, 20 bp, Homo sapiens
tgcaggatcagtcttggaac

SEQ ID NO: 3800 - DNA, 20 bp, Homo sapiens
cgccgcgccaccgccctcct

SEQ ID NO: 3801 - DNA, 20 bp, Homo sapiens
tcttctccttccagctgtca

SEQ ID NO: 3802 - DNA, 20 bp, Homo sapiens
cacggatccaccttcccatg

SEQ ID NO: 3803 - DNA, 20 bp, Homo sapiens
gatctccctagataacctcc

SEQ ID NO: 3804 - DNA, 20 bp, Homo sapiens
atcgggtcacctgtcccttc

SEQ ID NO: 3805 - DNA, 20 bp, Homo sapiens
ctgctccctgccagggtacg

SEQ ID NO: 3806 - DNA, 20 bp, Homo sapiens
ggcgtaggcggggcgagtcc

SEQ ID NO: 3807 - DNA, 20 bp, Homo sapiens
ggcggggcgagtcccaggag

SEQ ID NO: 3808 - DNA, 20 bp, Homo sapiens
gcggggcgagtcccaggagc

SEQ ID NO: 3809 - DNA, 20 bp, Homo sapiens
ggcgagtcccaggagccaat

SEQ ID NO: 3810 - DNA, 20 bp, Homo sapiens
gcgagtcccaggagccaatc

SEQ ID NO: 3811 - DNA, 20 bp, Homo sapiens
cccaggagccaatcagaggc

SEQ ID NO: 3812 - DNA, 20 bp, Homo sapiens
agccaatcagaggcccatgc

SEQ ID NO: 3813 - DNA, 20 bp, Homo sapiens
tcagaggcccatgccgggtg

SEQ ID NO: 3814 - DNA, 20 bp, Homo sapiens
cgcaggtccctaggcctggc

SEQ ID NO: 3815 - DNA, 20 bp, Homo sapiens
ccggccgtggctgtgggcca

SEQ ID NO: 3816 - DNA, 20 bp, Homo sapiens
cccgctggtggggccaggcc

SEQ ID NO: 3817 - DNA, 20 bp, Homo sapiens
acctgctgctccctgccagg

SEQ ID NO: 3818 - DNA, 20 bp, Homo sapiens
agattgtcatggccatagac

SEQ ID NO: 3819 - DNA, 20 bp, Homo sapiens
gctggtggctgtgggcaccc

SEQ ID NO: 3820 - DNA, 20 bp, Homo sapiens
cactgccatggtgagcgggg

SEQ ID NO: 3821 - DNA, 20 bp, Homo sapiens
cgacattcctcggtatttat

SEQ ID NO: 3822 - DNA, 20 bp, Homo sapiens
cggtatttattgtctgtccc

SEQ ID NO: 3823 - DNA, 20 bp, Homo sapiens
tgggctccgatcgggtcacc

SEQ ID NO: 3824 - DNA, 20 bp, Homo sapiens
tgtcccttctctctccagct

SEQ ID NO: 3825 - DNA, 20 bp, Homo sapiens
tctctccagctagatggccc

SEQ ID NO: 3826 - DNA, 20 bp, Homo sapiens
gccgacttcttgcagtgggg

SEQ ID NO: 3827 - DNA, 20 bp, Homo sapiens
gctgccttaaaagggctcaa

SEQ ID NO: 3828 - DNA, 20 bp, Homo sapiens
acggatccaccttcccatgt

SEQ ID NO: 3829 - DNA, 20 bp, Homo sapiens
aggcgaggtgtcgtgcttcc

SEQ ID NO: 3830 - DNA, 20 bp, Homo sapiens
atccaccttcccatatggcc

SEQ ID NO: 3831 - DNA, 25 bp, Homo sapiens
tgctgctgctgctgctgctgctgct

SEQ ID NO: 3832 - DNA, 20 bp, Homo sapiens
ctgctgctgctgctgctgct

SEQ ID NO: 3833 - DNA, 15 bp, Homo sapiens
tgctgctgctgctgc

SEQ ID NO: 3834 - DNA, 19 bp, Homo sapiens
ctgctgctgctgctgctgc

SEQ ID NO: 3835 - DNA, 18 bp, Homo sapiens
tgctgctgctgctgctgc

SEQ ID NO: 3836 - DNA, 19 bp, Homo sapiens
tgctgctgctgctgctgct

SEQ ID NO: 3837 - DNA, 16 bp, Homo sapiens
tgctgctgctgctgct

SEQ ID NO: 3838 - DNA, 16 bp, Homo sapiens
agccacacgtgcaagc

SEQ ID NO: 3839 - DNA, 14 bp, Homo sapiens
gccacacgtgcaag

SEQ ID NO: 3840 - DNA, 16 bp, Homo sapiens
ctgccagttcacaacc

SEQ ID NO: 3841 - DNA, 14 bp, Homo sapiens
tgccagttcacaac

SEQ ID NO: 3842 - DNA, 16 bp, Homo sapiens
cagttcacaaccgctc

SEQ ID NO: 3843 - DNA, 14 bp, Homo sapiens
agttcacaaccgct

SEQ ID NO: 3844 - DNA, 16 bp, Homo sapiens
ggcctgggaaggcagc

SEQ ID NO: 3845 - DNA, 14 bp, Homo sapiens
gcctgggaaggcag

SEQ ID NO: 3846 - DNA, 16 bp, Homo sapiens
ttggttcgcaaagtgc

SEQ ID NO: 3847 - DNA, 14 bp, Homo sapiens
tggttcgcaaagtg

SEQ ID NO: 3848 - DNA, 16 bp, Homo sapiens
aaagtgcaaagctttc

SEQ ID NO: 3849 - DNA, 14 bp, Homo sapiens
aagtgcaaagcttt

SEQ ID NO: 3850 - DNA, 16 bp, Homo sapiens
ttgacctcgtcctccg

SEQ ID NO: 3851 - DNA, 14 bp, Homo sapiens
tgacctcgtcctcc

SEQ ID NO: 3852 - DNA, 16 bp, Homo sapiens
gactcgctgacaggct

SEQ ID NO: 3853 - DNA, 14 bp, Homo sapiens
actcgctgacaggc

SEQ ID NO: 3854 - DNA, 16 bp, Homo sapiens
ctgacaggctacagga

SEQ ID NO: 3855 - DNA, 14 bp, Homo sapiens
tgacaggctacagg

SEQ ID NO: 3856 - DNA, 21 bp, Homo sapiens
aacttcgccagtcaactacgc

SEQ ID NO: 3857 - DNA, 20 bp, Homo sapiens
ttggttcgcaaagtgcaaag

SEQ ID NO: 3858 - DNA, 20 bp, Homo sapiens
cgttggttcgcaaagtgcaa

SEQ ID NO: 3859 - DNA, 20 bp, Homo sapiens
gcaaagtgcaaagctttctt

SEQ ID NO: 3860 - DNA, 20 bp, Homo sapiens
tattgacctcgtcctccgac

SEQ ID NO: 3861 - DNA, 20 bp, Homo sapiens
gccagttcacaaccgctccg

SEQ ID NO: 3862 - DNA, 18 bp, Homo sapiens
agcctgagccgggagatg

SEQ ID NO: 3863 - DNA, 21 bp, Homo sapiens
aggccatccgcacggacaacc

SEQ ID NO: 3864 - DNA, 15 bp, Homo sapiens
cgggccgtccgtgtt

SEQ ID NO: 3865 - DNA, 21 bp, Homo sapiens
catcctccacgcacccccacc

SEQ ID NO: 3866 - DNA, 18 bp, Homo sapiens
catctcccggctcaggct

SEQ ID NO: 3867 - DNA, 21 bp, Homo sapiens
ggttgtccgtgcggatggcct

SEQ ID NO: 3868 - DNA, 15 bp, Homo sapiens
aacacggacggcccg

SEQ ID NO: 3869 - DNA, 21 bp, Homo sapiens
ggtgggggtgcgtggaggatg

SEQ ID NO: 3870 - protein, 10 aa, Artificial Sequence
  Synthetic
GYTFTNYWMH

SEQ ID NO: 3871 - protein, 17 aa, Artificial Sequence
  Synthetic
EINPINGRSNYGERFKT

SEQ ID NO: 3872 - protein, 7 aa, Artificial Sequence
  Synthetic
GTRAMHY

SEQ ID NO: 3873 - protein, 11 aa, Artificial Sequence
  Synthetic
RTSENIYNNLA

SEQ ID NO: 3874 - protein, 7 aa, Artificial Sequence
  Synthetic
AATNLAD

SEQ ID NO: 3875 - protein, 10 aa, Artificial Sequence
  Synthetic
QHFWGTPLTF

SEQ ID NO: 3876 - protein, 116 aa, Artificial Sequence
  Synthetic
QVQLQQPGAELVKPGASVKLSCKASGYTFTNYWMHWVKQRPGQGLEWIGEINPINGRSNYGERFKTKATLTVDKSSSTAYMQLSSLTSEDSAVYYCARGTRAMHYWGQGTSVTVSS

SEQ ID NO: 3877 - protein, 107 aa, Artificial Sequence
  Synthetic
DIQMTQSPASLSVSVGETVTITCRTSENIYNNLAWYQQKQGKSPQLLVYAATNLADGVPSRFSGSGSGTQYSLKINSLQSEDFGNYYCQHFWGTPLTFGAGTKLELK

SEQ ID NO: 3878 - protein, 9 aa, Artificial Sequence
  Synthetic
YTFTNYWMH

SEQ ID NO: 3879 - protein, 17 aa, Artificial Sequence
  Synthetic
EINPINGRSNYAQKFQG

SEQ ID NO: 3880 - protein, 17 aa, Artificial Sequence
  Synthetic
EINPINGRSNYAEKFQG

SEQ ID NO: 3881 - protein, 17 aa, Artificial Sequence
  Synthetic
EINPIQGRSNYAEKFQG

SEQ ID NO: 3882 - protein, 9 aa, Artificial Sequence
  Synthetic
QHFWGTPLT

SEQ ID NO: 3883 - protein, 7 aa, Artificial Sequence
  Synthetic
AATNLAE

SEQ ID NO: 3884 - protein, 11 aa, Artificial Sequence
  Synthetic
RTSENIYSNLA

SEQ ID NO: 3885 - protein, 7 aa, Artificial Sequence
  Synthetic
AGTNLAD

SEQ ID NO: 3886 - protein, 116 aa, Artificial Sequence
  Synthetic
QVQLVQSGAEVKKPGASVKVSCKASGYTFTNYWMHWVRQAPGQGLEWMGEINPINGRSNYAQKFQGRVTLTVDTSISTAYMELSRLRSDDTAVYYCARGTRAMHYWGQGTLVTVSS

SEQ ID NO: 3887 - protein, 116 aa, Artificial Sequence
  Synthetic
QVQLVQSGAEVKKPGASVKVSCKASGYTFTNYWMHWVRQAPGQGLEWIGEINPINGRSNYAEKFQGRVTLTVDTSSSTAYMELSRLRSDDTAVYYCARGTRAMHYWGQGTLVTVSS

SEQ ID NO: 3888 - protein, 116 aa, Artificial Sequence
  Synthetic
QVQLVQSGAEVKKPGASVKVSCKASGYTFTNYWMHWVRQAPGQGLEWMGEINPIQGRSNYAEKFQGRVTLTVDTSSSTAYMELSSLRSEDTATYYCARGTRAMHYWGQGTLVTVSS

SEQ ID NO: 3889 - protein, 116 aa, Artificial Sequence
  Synthetic
QVQLVQSGAEVKKPGASVKVSCKASGYTFTNYWMHWVRQAPGQGLEWMGEINPINGRSNYAEKFQGRVTLTVDTSSSTAYMELSSLRSEDTATYYCARGTRAMHYWGQGTLVTVSS

SEQ ID NO: 3890 - protein, 107 aa, Artificial Sequence
  Synthetic
DIQMTQSPSSLSASVGDRVTITCRTSENIYNNLAWYQQKPGKSPKLLIYAATNLADGVPSRFSGSGSGTDYTLTISSLQPEDFATYYCQHFWGTPLTFGGGTKVEIK

SEQ ID NO: 3891 - protein, 107 aa, Artificial Sequence
  Synthetic
DIQMTQSPSSLSASVGDRVTITCRTSENIYNNLAWYQQKPGKAPKLLIYAATNLADGVPSRFSGSGSGTDYTLTISSLQPEDFATYYCQHFWGTPLTFGGGTKVEIK

SEQ ID NO: 3892 - protein, 107 aa, Artificial Sequence
  Synthetic
DIQMTQSPSSLSASVGDRVTITCRTSENIYNNLAWYQQKPGKAPKLLIYAATNLAEGVPSRFSGSGSGTDYTLTISSLQPEDFATYYCQHFWGTPLTFGGGTKVEIK

SEQ ID NO: 3893 - protein, 107 aa, Artificial Sequence
  Synthetic
DIQMTQSPSSLSASVGDRVTITCRTSENIYSNLAWYQQKPGKAPKLLIYAGTNLADGVPSRFSGSGSGTDYTLTISSLQPEDFANYYCQHFWGTPLTFGGGTKVEIK
